(19) United States
(12) Patent Application Publication
(10) Pub. No.: US 2024/0390418 A1
(43) Pub. Date: Nov. 28, 2024

(54) ANTI-VARIABLE MUC1* ANTIBODIES AND USES THEREOF

(71) Applicant: Minerva Biotechnologies Corporation, Waltham, MA (US)

(72) Inventors: Cynthia BAMDAD, Waltham, MA (US); Benoit SMAGGHE, Waltham, MA (US)

(21) Appl. No.: 18/018,536

(22) PCT Filed: Jul. 27, 2021
(86) PCT No.: PCT/US2021/071017

§ 371 Date: Jan. 27, 2023

Related U.S. Application Data
(60) Provisional application No. 63/184,724, filed on May 5, 2021.
(60) Provisional application No. 63/173,083, filed on Apr. 9, 2021.
(60) Provisional application No. 63/151,380, filed on Feb. 19, 2021.
(60) Provisional application No. 63/122,234, filed on Dec. 7, 2020.
(60) Provisional application No. 60/058,044, filed on Sep. 4, 1997.

(51) Int. Cl. A61K 35/17; A61K 39/00; A61P 35/00; C07K 14/725; C07K 16/30; C12N 5/0783; C12N 15/86

(52) U.S. Cl. CPC A61K 35/17; A61K 39/4611; A61K 39/4631; A61K 39/46447; A61P 35/00; C07K 14/7051; C07K 16/3092; C12N 5/0636; C12N 15/86; A61K 2239/13; A61K 2239/17; A61K 2239/21; A61K 2239/22; C07K 2317/565; C07K 2317/622; C07K 2317/73; C07K 2319/02; C07K 2319/03; C07K 2319/33; C12N 2510/00; C12N 2740/15043

(57) ABSTRACT

The present application discloses an antibody, or fragment thereof, for the diagnosis, treatment or prevention of cancers wherein the antibody specifically binds to the PSMGFR peptide (SEQ ID NO:2) or a fragment thereof of the peptide.

### SEQUENCE LISTING

[0001] The instant application contains a Sequence Listing which has been submitted electronically in ASCII format and is hereby incorporated by reference in its entirety. Said ASCII copy, created on Aug. 30, 2023, is named 56699-746_831 Replacement SL.txt and is 1,205,559 bytes in size.

### CROSS REFERENCE

[0002] This application is a national stage entry of International Application No. PCT/US2021/071017, filed Jul. 27, 2021, which claims the benefit of U.S. Provisional Application No. 63/184,724, filed May 5, 2021, U.S. Provisional Application No. 63/173,083, filed Apr. 9, 2021, U.S. Provisional Application No. 63/151,380, filed Feb. 19, 2021, U.S. Provisional Application No. 63/122,234, filed Dec. 7, 2020, and U.S. Provisional Application No. 63/058,044, filed Jul. 29, 2020, each of which is incorporated herein by reference it its entirety.

### BACKGROUND OF THE INVENTION

### 1. Field of the Invention

[0003] The present application relates to human, humanized and non-human anti-MUC1* antibodies and methods of making and using them. The present application also relates to using an immune cell transfected or transduced with a cleavage enzyme for the treatment of cancer. The present invention also relates to using an immune cell transfected or transduced with a CAR and another protein for the treatment of cancer.

### 2. General Background and State of the Art

[0004] We previously discovered that a cleaved form of the MUC1 (SEQ ID NO: 1) transmembrane protein is a growth factor receptor that drives the growth of over 75% of all human cancers. The cleaved form of MUC1, which we called MUC1* (pronounced muk 1 star), is a powerful growth factor receptor. Cleavage and release of the bulk of the extracellular domain of MUC1 unmasks a binding site for activating ligands dimeric NME1, NME6, NME7, NME7_{AB}, NME7-X1 or NME8. It is an ideal target for cancer drugs as it is aberrantly expressed on over 75% of all cancers and is likely overexpressed on an even higher percentage of metastatic cancers (Mahanta et al. (2008) A Minimal Fragment of MUC1 Mediates Growth of Cancer Cells. PLoS ONE 3(4): e2054. doi:10.1371/journal.pone.0002054; Fessler et al. (2009), “MUC1* is a determinant of trastuzumab (Herceptin) resistance in breast cancer cells,” Breast Cancer Res Treat. 118(1):113-124). After MUC1 cleavage most of its extracellular domain is shed from the cell surface. The remaining portion has a truncated extracellular domain that comprises most or all of the primary growth factor receptor sequence called PSMGFR (SEQ ID NO:2).

[0005] Antibodies are increasingly used to treat human diseases. Antibodies generated in non-human species have historically been used as therapeutics in humans, such as horse antibodies. More recently, antibodies are engineered or selected so that they contain mostly, or all, human sequences in order to avoid a generalized rejection of the foreign antibody. The process of engineering recognition fragments of a non-human antibody into a human antibody is generally called ‘humanizing’. The amount of non-human sequences that are used to replace the human antibody sequences determines whether they are called chimeric, humanized or fully human.

[0006] Alternative technologies exist that enable generation of humanized or fully human antibodies. These strategies involve screening libraries of human antibodies or antibody fragments and identifying those that bind to the target antigen, rather than immunizing an animal with the antigen. Another approach is to engineer the variable region(s) of an antibody into an antibody-like molecule. Another approach involves immunizing a humanized animal. The present invention is intended to also encompass these approaches for use with recognition fragments of antibodies that the inventors have determined bind to the extracellular domain of MUC1*.

[0007] In addition to treating patients with an antibody, cancer immunotherapies have recently been shown to be effective in the treatment of blood cancers. One cancer immunotherapy, called CAR T (chimeric antigen receptor T cell) therapy, engineers a T cell so that it expresses a chimeric receptor having an extra cellular domain that recognizes a tumor antigen, a transmembrane domain and cytoplasmic tail comprising T cell signaling and co-stimulatory components (Dai H, Wang Y, Lu X, Han W. (2016) Chimeric Antigen Receptors Modified T cells for Cancer Therapy. J Natl Cancer Inst. 108(7): djv439). Such receptor is composed of a single chain antibody fragment (scFv) that recognizes a tumor antigen, linked to a T cell transmembrane, signaling domain and co-stimulatory domain or domains. Upon binding of the receptor to a cancer associated antigen, a signal is transmitted resulting in T cell activation, propagation and the targeted killing of the cancer cells. In practice, T cells are isolated from a patient or donor and transduced with a CAR, expanded and then injected back into the patient. If from a donor, the immune cells may be mutated or engineered such that they do not induce graft versus host disease in the recipient. When the CAR T cells bind to the antigen on a cancer cell, the CAR T cells attack the cancer cells and then expand that population of T cells.

[0008] Thus far, CAR T therapies have been very successful in the treatment of blood cancers but as yet have not shown efficacy against solid tumors in humans. Because most blood cancers are B cell malignancies, the CAR T cells can just eliminate all of the patient's B cells without causing serious harm to the patient. There is no B cell equivalent in solid tumors. Most tumor associated antigens are also expressed on normal tissues; they are just expressed at a higher level in cancerous tissues. Thus, the challenge is to develop an antibody that recognizes an epitope on a tumor associated antigen that is somehow different in the context of the tumor compared to normal tissue. To further minimize the risk of off-tumor/on-target killing of normal tissues, the antibody should recognize and bind to cancerous tissues at least two-times more than normal tissues. Antibodies that are not so cancer selective may be used therapeutically if they are inducibly expressed at the tumor site.

[0009] Another cancer therapy that incorporates cancer selective antibodies is Bispecific T cell Engagers, also called BiTEs. The BiTE approach attempts to eliminate the CAR T associated risk of off-tumor/on-target effects. Unlike CAR T, BiTEs are bispecific antibodies that should not pose any greater risk than regular antibody-based therapies. However, unlike typical anti-cancer antibodies that bind to and block a cancer antigen, BiTEs are designed to bind to an antigen on the tumor cell and simultaneously bind to an antigen on an immune cell, such as a T cell. In this way, a BiTE recruits the T cell to the tumor. BiTEs are engineered proteins that simultaneously bind to a cancer associated antigen and a T cell surface protein such as CD3-epsilon. BiTEs are antibodies made by genetically linking the scFv's of an antibody that binds to a T cell antigen, like anti-CD3-epsilon to a scFv of a therapeutic monoclonal antibody that binds to a cancer antigen (Patrick A. Baeuerle, and Carsten Reinhardt (2009) Bispecific T cell engaging antibodies for cancer therapy. Cancer Res. 69(12):4941-4944). A drawback of BiTE technology is that, unlike CAR T cells, they do not expand in the patient, so have limited persistence.

[0010] Yet another cancer therapy that incorporates cancer selective antibodies is antibody drug conjugate, also called ADC, technology. In this case, a toxin, or a precursor to a toxin, is linked to a cancer selective antibody. Unlike CAR T cells that use the CD8 positive T cell's natural killing to kill cancer cells, ADCs carry a toxic payload to the tumor. Drawbacks of ADCs include the potential of delivering the toxic payload to normal cells and that most ADCs require binding to a cell surface molecule which then gets internalized after binding, with an approximate 10,000 surface molecule required for resultant cell death.

### SUMMARY OF THE INVENTION

[0011] In one aspect, the present invention is directed to a non-human, human or humanized anti-MUC1* antibody or antibody fragment or antibody-like protein that binds to a region on extracellular domain of MUC1 isoform or cleavage product that is devoid of the tandem repeat domains. The non-human, human or humanized anti-MUC1* antibody or antibody fragment or antibody-like protein may specifically bind to
[0012] (i) PSMGFR region of MUC1;
[0013] (ii) PSMGFR peptide;
[0014] (iii) a peptide having amino acid sequence of QFNQYKTEAASRYNLTISDVSVSDVPFPFSAQSGA (N-10) (SEQ ID NO:3)
[0015] (iv) a peptide having amino acid sequence of
[0016] ASRYNLTISDVSVSDVPFPFSAQSGA (N-19) (SEQ ID NO:4)
[0017] (v) a peptide having amino acid sequence of
[0018] NLTISDVSVSDVPFPFSAQSGA (N-23) (SEQ ID NO:5)
[0019] (vi) a peptide having amino acid sequence of
[0020] ISDVSVSDVPFPFSAQSGA (N-26) (SEQ ID NO:6)
[0021] (vii) a peptide having amino acid sequence of
[0022] SVSDVPFPFSAQSGA (N-30) (SEQ ID NO:7)
[0023] (viii) a peptide having amino acid sequence of
[0024] QFNQYKTEAASRYNLTISDVSVSDVPFPFS (N-10/C-5) (SEQ ID NO:8)
[0025] (ix) a peptide having amino acid sequence of
[0026] ASRYNLTISDVSVSDVPFPFS (N-19/C-5) (SEQ ID NO:9)
[0027] (x) a peptide having amino acid sequence of
[0028] FPFSAQSGA (SEQ ID NO:10)

[0029] The non-human, human or humanized antibody may be IgG1, IgG2, IgG3, IgG4 or IgM. The human or humanized antibody fragment or antibody-like protein may be scFv or scFv-Fc.

[0030] The murine, camelid, human or humanized antibody, antibody fragment or antibody-like protein as in above may comprise a heavy chain variable region and light chain variable region which is derived from mouse monoclonal MNC2, MNE6, 20A10, 3C2B1, 5C6F3, 25E6, 18G12, 28F9, 1E4, B12, B2, B7, B9, 8C7F3, and H11 antibody, and has at least 80%, 90% or 95% or 98% sequence identity to the mouse monoclonal MNC2, MNE6, 20A10, 3C2B1, 5C6F3, 25E6, 18G12, 28F9, 1E4, B12, B2, B7, B9, 8C7F3, and H11 antibody. The heavy chain variable region of CDR1 and CDR2 may have at least 90% or 95% or 98% sequence identity to the particularly indicated antibody heavy chain variable region sequence set forth in the present application in the sequence listing, and the light chain variable region of CDR1 and CDR2 may have at least 90% or 95% or 98% sequence identity to the particularly indicated antibody heavy chain variable region sequence set forth in the present application in the sequence listing section. The heavy chain variable region of CDR3 may have at least 80% or 85% or 90% sequence identity to the particularly indicated antibody heavy chain variable region sequence set forth in the present application in the sequence listing, and the light chain variable region of CDR3 may have at least 80% or 85% or 90% sequence identity to the particularly indicated antibody heavy chain variable region sequence set forth in the present application in the sequence listing section.

[0031] The murine, camelid, human or humanized antibody, antibody fragment or antibody-like protein according to above may include complementarity determining regions (CDRs) in the heavy chain variable region and light chain variable region having at least 90% or 95% or 98% sequence identity to the particularly indicated antibody heavy chain CDR1, CDR2 or CDR3 region and light chain CDR1, CDR2 or CDR3 region sequences set forth in the present application in the sequence listing section.

[0032] In another aspect, the present invention is directed to an anti-MUC1* extracellular domain antibody or anti-N-10 antibody, which may be any of the antibodies described above, comprised of sequences represented by humanized IgG2 heavy chain, or humanized IgG1 heavy chain, paired with humanized Kappa light chain, or humanized Lambda light chain. The humanized IgG2 heavy chain may be SEQ ID NOS:55, humanized IgG1 heavy chain may be SEQ ID NO:58, humanized Kappa light chain may be SEQ ID NO:110, and humanized Lambda light chain may be SEQ ID NO:114, or a sequence having 90%, 95% or 98% sequence identity thereof.

[0033] In another aspect, the present invention is directed to an anti-MUC1* extracellular domain antibody or anti-N-10 antibody, which may be any of the antibodies described above, comprised of sequences represented by human IgG2 heavy chain, or human IgG1 heavy chain, paired with human Kappa light chain, or human Lambda light chain. The human IgG2 heavy chain may be SEQ ID NOS:55, human IgG1 heavy chain may be SEQ ID NO:58, human Kappa light chain may be SEQ ID NO:110, and human Lambda light chain may be SEQ ID NO: 114, or a sequence having 90%, 95% or 98% sequence identity thereof.

[0034] In another aspect, the invention is directed to an anti-MUC1* extracellular domain antibody or anti-N-10 antibody comprised of sequences of a humanized MNC2 represented by humanized IgG1 heavy chain, humanized IgG2 heavy chain, paired with humanized Lambda light chain, and humanized Kappa light chain.

[0035] In another aspect, the invention is directed to an anti-MUC1* extracellular domain antibody or anti-N-10 antibody comprised of sequences of a humanized MNC2, MNE6, 20A10, 3C2B1, 5C6F3, 25E6, 18G12, 28F9, 1E4, B12, B2, B7, B9, 8C7F3, or H11 represented by humanized IgG1 heavy chain or humanized IgG2 heavy chain, paired with humanized Lambda light chain, or humanized Kappa light chain.

[0036] In another aspect, the invention is directed to an antibody that is “like” MNC2, MNE6, 20A10, 3C2B1, 5C6F3, 25E6, 18G12, 28F9, 1E4, B12, B2, B7, B9, 8C7F3, or H11 in that they have the same or very similar pattern of binding to subsets of peptides derived from the PSMGFR peptide, also do not recognize a linear epitope, competitively inhibit the binding of NME1 or NME7_{AB} to MUC1*, recognize a MUC1 transmembrane cleavage product produced by cleavage by MMP9 or contain CDR sequences that are at least 80% homologous to the MNE6, MNC2, MN18G12, MN20A10, MN25E6, MN28F9, MN5C6F3, MN3C2B1, and MN1E4 CDR consensus sequences.

[0037] In another aspect, the invention is directed to an antibody that binds to the extra cellular domain of a MUC1 that is devoid of the tandem repeat domain, which may be a cleavage product. In one aspect of the invention, the antibody binds to a peptide having the sequence of QFNQYKTEAASRYNLTISDVSVSDVPFPFSAQSGA (N-10). In one aspect of the invention, the antibody binds to a peptide having the sequence of ASRYNLTISDVSVSDVPFPFSAQSGA (N-19). In one aspect of the invention, the antibody binds to a peptide having the sequence of SVSDVPFPFSAQSGA (N-30). In one aspect of the invention, the antibody binds to a peptide having the sequence of FPFSAQSGA (N-36). Examples of such antibodies include but are not limited to monoclonal antibodies MNC2, MNE6, 20A10, 3C2B1, 5C6F3, 25E6, 18G12, 28F9, 1E4, B12, B2, B7, B9, 8C7F3, and H11. The heavy chain and light chain complementary determining region sequences for these antibodies are set forth in the present application in the sequence listing section.

[0038] In one aspect of the invention, one or more of these antibodies is administered to a patient diagnosed with or at risk of developing a cancer. The antibody may be human or humanized. The antibody may be murine or camelid. The antibody may be bivalent or monovalent. The antibody may be a fragment, including a single chain fragment, scFv, of one of the antibodies. The antibody or antibody fragment may be administered directly to the patient or incorporated into a multi-specific antibody-like molecule, a bispecific antibody, a bispecific T cell engager, BiTE, or an antibody drug conjugate, ADC. The antibody or antibody fragment may be incorporated into a T cell receptor, TCR. The sequence of the antibody or antibody fragment may be incorporated into a chimeric antigen receptor, a “CAR”, or other similar entity, then introduced into an immune cell, ex vivo, then administered to a patient diagnosed with or at risk of developing a cancer. The immune cell, which may be a T cell or natural killer cell, may be derived from a donor or from the patient. In one aspect the immune cell is derived from a stem cell that has been directed to differentiate to that immune cell type in vitro. In another aspect the immune cell is derived from a stem cell that has been directed to differentiate to that immune cell type in vitro. In another aspect, a CAR containing sequences of the antibody are expressed in a stem cell, which then may be differentiated into an immune cell. In one case, the immune cell is a T cell. In another case, the immune cell is an NK cell. In one aspect, the antibody or a CAR containing sequences of the antibody may be expressed off of an inducible promoter. In one case the antibody or the CAR is expressed upon activation of the T cell or other immune cell. In one instance, the antibody or the CAR of the invention is expressed off of an NFAT response element. In another instance, CAR recognition of a target tumor cell activates the immune cell, leading to NFAT inducible expression of a cytokine, such as IL-12 or IL-18, or expression of a checkpoint inhibitor such as a PD1 inhibitor or a PDL-1 inhibitor. In yet another aspect, CAR recognition of a target tumor cell activates the immune cell, leading to NFAT inducible expression of a second CAR that contains sequences of a second antibody.

[0039] In another aspect, the invention is directed to a murine, camelid, human, humanized anti-MUC1* antibody or antibody fragment or antibody-like protein that binds to the N-10 peptide, according to above, which inhibits the binding of NME protein to MUC1*. The NME may be NME1, NME6, NME7_{AB}, NME7-X1, NME7 or NME8.

[0040] In yet another aspect, the invention is directed to a single chain variable fragment (scFv) comprising a heavy and light chain variable regions connected via a linker, further comprising CDRs of antibodies that bind to MUC1* extracellular domain. The CDRs may be derived from MNC2, MNE6, 20A10, 3C2B1, 5C6F3, 25E6, 18G12, 28F9, 1E4, B12, B2, B7, B9, 8C7F3, and H11. The scFv may be one that possesses the SEQ ID NOS:233, 235 or 237 (MNE6); SEQ ID NOS:238-243, 654-655 or 5017-5020 (MNC2); SEQ ID NOS:1574-1581 or 5001-5012 (20A10); SEQ ID NOS:1573 or 1813 (3C2B1); SEQ ID NOS:1385 or 1815 (5C6F3); SEQ ID NOS:1599 or 1601 (25E6).

[0041] In still another aspect, the invention is directed to a chimeric antigen receptor (CAR) comprising a scFv or a humanized variable region that binds to the extracellular domain of a MUC1 that is devoid of tandem repeats, a linker molecule, a transmembrane domain and a cytoplasmic domain. The single chain antibody fragment may bind to
[0042] (i) PSMGFR region of MUC1;
[0043] (ii) PSMGFR peptide;
[0044] (iii) a peptide having amino acid sequence of QFNQYKTEAASRYNLTISDVSVSDVPFPFSAQSGA (N-10) (SEQ ID NO:3)
[0045] (iv) a peptide having amino acid sequence of
[0046] ASRYNLTISDVSVSDVPFPFSAQSGA (N-19) (SEQ ID NO:4)
[0047] (v) a peptide having amino acid sequence of
[0048] NLTISDVSVSDVPFPFSAQSGA (N-23) (SEQ ID NO:5)
[0049] (vi) a peptide having amino acid sequence of
[0050] ISDVSVSDVPFPFSAQSGA (N-26) (SEQ ID NO:6)
[0051] (vii) a peptide having amino acid sequence of
[0052] SVSDVPFPFSAQSGA (N-30) (SEQ ID NO:7)
[0053] (viii) a peptide having amino acid sequence of
[0054] QFNQYKTEAASRYNLTISDVSVSDVPFPFS (N-10/C-5) (SEQ ID NO:8)
[0055] (ix) a peptide having amino acid sequence of
[0056] ASRYNLTISDVSVSDVPFPFS (N-19/C-5) (SEQ ID NO:9)
[0057] (x) a peptide having amino acid sequence of
[0058] FPFSAQSGA (N-36) (SEQ ID NO: 10)

[0059] In the CAR as described above, portions of any of the variable regions set forth and described above, or combination thereof may be used in the extracellular domain of the CAR. The CAR also comprises a transmembrane region and a cytoplasmic tail that comprises sequence motifs that signal immune system activation. The extracellular domain may be comprised of murine, camelid, human, non-human, or humanized single chain antibody fragments of an MNC2, MNE6, 20A10, 3C2B1, 5C6F3, 25E6, 18G12, 28F9, 1E4, B12, B2, B7, B9, 8C7F3, and H11. Additional antibodies from which single chain antibody fragments may be made include but are not limited to monoclonal antibodies that are like MNC2, MNE6, 20A10, 3C2B1, 5C6F3, 25E6, 18G12, 28F9, 1E4, B12, B2, B7, B9, 8C7F3, and H11 in that they have the same or very similar pattern of binding to subsets of peptides derived from the PSMGFR peptide, may not recognize a linear epitope or competitively inhibit the binding of NME1 or NME7_{AB} to MUC1*, or recognize a MUC1 transmembrane cleavage product produced by cleavage by MMP9 or contain CDR sequences that are at least 80% homologous to the MNC2, MNE6, 20A10, 3C2B1, 5C6F3, 25E6, 18G12, 28F9, 1E4, B12, B2, B7, B9, 8C7F3, and H11 CDR consensus sequences.

[0060] In the CARs as described above, the extracellular domain may include a murine, camelid, human, non-human or humanized single chain antibody fragments of an MNE6 scFv set forth as SEQ ID NOS: 233, 235, or 237, MNC2 scFv (SEQ ID NOS:239, 241,243, 655 or 5017-5020), 20A10 scFv as set forth as SEQ ID NOS:1575, 1577, 1579, 1581 or 5001-5012, 3C2B1 scFv as set forth as SEQ ID NOS:1573 or 1813, 5C6F3 scFv as set forth as SEQ ID NOS:1385 or 1815, or 25E6 scFv as set forth as SEQ ID NOS:1599 or 1601.

[0061] In the process of humanizing an antibody, one must annotate the sequence to identify the different functional regions, such as the complementarity determining regions (CDRs), the framework regions and the constant regions. Various computer programs are available that assign certain sequences to the CDRs, framework regions and constant regions. Depending on the program used, the exact position where one region ends and the next begins may differ by a few amino acids. Typically, humanized single chain constructs, scFvs, contain heavy and light chain CDRs supported by intervening framework regions, wherein the heavy and light chain are connected through a flexible linker. Depending on the annotation program used, the sequence assigned to framework region IV may extend into the constant region. In some cases, extension of framework region IV may provide more stability to the scFv. Here we provide sequences for humanized scFv's of the invention, wherein the length of framework region IV of the light chain may vary. For example, in some cases the C-terminus of Framework region IV ends in the amino acids R, T. In other cases, it ends in R alone. Still in other cases, the terminal R and T are both omitted. In the CARs described here, the extracellular domain may include a murine, camelid, human, non-human or humanized single chain antibody fragments with framework region IV having variable lengths as set forth as MNE6 scFv (SEQ ID NOS: 5014 or 5016), MNC2 scFv (SEQ ID NOS: 5018 or 5020), or 20A10 scFv (SEQ ID NOS: 5002, 5004, 5006, 5008, 5010 or 5012) or 25E6 scFv (SEQ ID NOS: 5030 or 5032).

[0062] In any of the CARs described here, the cytoplasmic tail may be comprised of one or more of signaling sequence motifs and co-stimulatory domains, including but not limited to CD3-zeta, CD3-zeta-1XX CD27, CD28, 4-1BB, OX40, CD30, CD40, ICAm-1, LFA-1, ICOS, CD2, CD5, or CD7. Additionally, the sequence of the intracellular signaling domain may contain mutations that dampen the signal to improve persistence or to improve killing of low antigen density tumor cells. The cytoplasmic tail may be comprised of one or more of signaling sequence motifs and co-stimulatory sequence motifs CD3-zeta, CD27, CD28, 4-1BB, OX40, CD30, CD40, ICAm-1, LFA-1, ICOS, CD2, CD5, or CD7. The transmembrane and extracellular hinge region of the CAR may or may not be derived from sequences of the adjacent co-stimulatory domain. For example, a CAR comprising the 4-1BB co-stimulatory domain may have a transmembrane and hinge region derived from CD8 or CD28. In another example, a CAR comprising the CD28 co-stimulatory domain may have a transmembrane and hinge region derived from CD28. In any of the CARs described above, the cytoplasmic tails may include deletions or mutations that dampen signaling. Such deletions or mutations in one or more of the three immunoreceptor tyrosine-based activation motifs, also known as ITAMs, increase persistence of CAR bearing cells and decrease their differentiation as measured by an increase in the CD62L+ CD45RA− population. Such mutations include but are not limited to Tyrosines that are mutated to inhibit phosphorylation and signaling (Salter et al, 2018). In another aspect one or two ITAMs are deleted, leaving only one or two ITAMs (Feucht et al 2019). In another aspect, the position of the included ITAM or ITAMs is moved to a position proximal to the co-stimulatory domain. Suitable ITAM configurations for increased persistence of CARs include but are not limited to 1XX, X2X, XX3, 12X and 23X, wherein the numeral 1, 2 or 3 refers to ITAM1, ITAM2, or ITAM3 and X refers to the deletion of that ITAM. In a preferred embodiment ITAM1 is the only functional ITAM included in the CAR construct, also known as 1XX. In any of the CARs described above, the ITAMs of CD3-zeta may be deleted or mutated to inhibit or dampen signaling. In any of the CARs described above, the CD3 of the cytoplasmic tail may comprise deletions or mutations in or of the ITAMs including those referred to as 1XX (Feucht et al 2019; SEQ ID NO:1796-1797). In any of the CARs described above, the T cell may be engineered to overexpress c-Jun as a method to inhibit T cell exhaustion (Lynn et al 2019). The CAR constructs described above may be expressed in a T cell, an NK cell, a dendritic cell or other immune cell, which may be autologous or allogeneic. Allogeneic cells may be derived from human stem cells.

[0063] In any of the CARs described above, the CAR may include a single chain antibody fragment, scFv comprising a sequence derived from antibody MNE6, including but not limited to (SEQ ID NOS:12-13 and 65-66, 56-57, 107-108, 341-342, 391-394), from antibody MNC2, including but not limited to (SEQ ID NOS:118-119 and 168-169, 144-145 and 194-195, 654-655, 1788-1789), from antibody 20A10, including but not limited to (SEQ ID NOS:988-989 and 1004-1005, 1574-1581, 5001-5012, 1677, 1687), from antibody 3C2B1, including but not limited to (SEQ ID NOS:1820-1823, 1572-1573, 1812-1813), from antibody 5C6F3, including but not limited to (SEQ ID NOS:1816-1819, 1384-1385, 1814-1815), from antibody 25E6, including but not limited to (SEQ ID NOS:1020-1021, 1036-1037, 1598-1601), wherein the CAR hinge and transmembrane sequences may be derived from CD8 (SEQ ID NO:346 and SEQ ID NO:364), or from CD28 (SEQ ID NO:350 and SEQ ID NO:368), further comprising a co-stimulatory domain, which may be 41BB (SEQ ID NO:659) or CD28 (SEQ ID NO:378) and the CD3-zeta signaling domain may be derived from (SEQ ID NO:661) or may contain mutations including those referred to as 1XX (SEQ ID NO:1796-1797).

[0064] In any of the CARs described above, the sequence may be CAR MNE6 CD28/CD3z (SEQ ID NOS:298); CAR MNE6 4-1BB/CD3z (SEQ ID NOS:301); CAR MNE6 OX40/CD3z (SEQ ID NOS:617); CAR MNE6 CD28/4-1BB/CD3z (SEQ ID NOS:304); CAR MNE6 CD28/OX40/CD3z (SEQ ID NOS:619); CAR MNC2 CD3z (SEQ ID NOS:607); CAR MNC2 CD8 hinge/transmembrane CD28/CD3z SEQ ID NOS:609); CAR MNC2 CD8 hinge/transmembrane 4-1BB/CD3z (SEQ ID NOS:611 and SEQ ID NOS: 719); CAR MNC2 CD8 hinge/transmembrane 4-1BB/1XX (SEQ ID NOS:1619 and SEQ ID NOS: 1621); CAR MNC2 CD8 hinge/transmembrane CD28/1XX (SEQ ID NOS:1623 and SEQ ID NOS: 1625); CAR MNC2 CD28 hinge/transmembrane CD28/1XX (SEQ ID NO:5042 and SEQ ID NO: 5044); CAR MNC2 OX40/CD3z (SEQ ID NOS:613); CAR MNC2 CD28/4-1BB/CD3z (SEQ ID NOS: 307); CAR MNC2 CD28/OX40/CD3z (SEQ ID NOS:615); CAR 20A10 CD8 hinge/transmembrane 4-1BB/CD3z (SEQ ID NO:1583 and SEQ ID NO: 1585); CAR 20A10 CD8 hinge/transmembrane CD28/CD3z (SEQ ID NO:1587 and SEQ ID NO: 1589); CAR 20A10 CD8 hinge/transmembrane 4-1BB/1XX (SEQ ID NO:1591 and SEQ ID NO:1593); CAR 20A10 CD8 hinge/transmembrane CD28/1XX (SEQ ID NO:1595 and SEQ ID NO: 1597); CAR 20A10 CD28 hinge/transmembrane CD28/CD3z (SEQ ID NO:5022 and SEQ ID NO:5024); CAR 20A10 CD28 hinge/transmembrane CD28/1XX (SEQ ID NO:5026 and SEQ ID NO:5028); or CAR MNC3 4-1BB/CD3z (SEQ ID NOS: 601).

[0065] In another aspect, the invention is directed to a composition that includes at least two CARs with different extracellular domain units transfected into the same cell, which may be an immune cell, which may be derived from the patient requiring treatment for a cancer. The expression of the second CAR may be inducible and driven by the recognition of a target by the first CAR. The nucleic acid encoding the second CAR may be linked to an inducible promoter. The expression of the second CAR may be induced by an event that occurs specifically when the immune cell mounts an immune response to a target tumor cell. The antibody fragments of one or both of the CARs may direct the cell to a MUC1* positive tumor. The antibody fragments of the first and second CARs may bind to a MUC1* that is produced when MUC1 is cleaved by two different cleavage enzymes. Expression of the second CAR by the inducible promoter may be induced when the antibody fragment of the first CAR engages or binds to a MUC1 or MUC1* on the tumor. One way to do this is to induce expression of the second CAR when, or shortly after, an NFAT protein is expressed or translocated to the nucleus. For example, a sequence derived from an NFAT promoter region is put upstream of the gene for the second CAR. In this way, when the transcription factors that bind to the promoter of the NFAT protein are present in sufficient concentration to bind to and induce transcription of the NFAT protein, they will also bind to that same promoter that is engineered in front of the sequence for transcription of the second CAR. The NFAT protein may be NFAT1 also known as NFATc2, NFAT2 also known as NFATc or NFATc1, NFAT3 also known as NFATc4, NFAT4 also known as NFATc3, or NFAT5. In one aspect of the invention, the NFAT is NFATc1, NFATc3 or NFATc2. In one aspect of the invention, the NFAT is NFAT2 also known as NFATc1. SEQ ID NO:646 shows nucleic acid sequence of the upstream transcriptional regulatory region for NFAT2. The recognition unit of the second CAR may be an antibody fragment or a peptide, wherein the recognition units may bind to NME7, PD-1, PDL-1, or a checkpoint inhibitor.

[0066] The at least two CARs may have one CAR that does not have a tumor antigen targeting recognition unit and the other CAR does have a tumor antigen targeting recognition unit. In another aspect of the invention, one of the extracellular domain recognition units may bind to MUC1* extracellular domain. In another aspect of the invention, one of the extracellular domain recognition units may be an antibody fragment and the other is a peptide, which may be devoid of transmembrane and signaling motifs; the peptide may be a single chain antibody fragment or antibody. In another aspect of the invention, one of the recognition units may bind PD-1 or PDL-1. In another aspect of the invention, one extra cellular domain recognition unit is an anti-MUC1* antibody, antibody fragment or scFv chosen from the group consisting of MNC2, MNE6, 20A10, 3C2B1, 5C6F3, 25E6, 18G12, 28F9, 1E4, B12, B2, B7, B9, 8C7F3, and H11. The other recognition unit may be a CAR or may be an anti-NME7 antibody.

[0067] In another aspect, the invention is directed to a cell comprising a CAR with an extracellular domain that binds to the extra cellular domain of a MUC1 molecule that is devoid of tandem repeats. In another aspect, the invention is directed to a cell comprising a CAR with an extracellular domain that binds to a MUC1* transfected or transduced cell. The cell that includes the CAR may be an immune system cell, preferably a T cell, a natural killer cell (NK), a dendritic cell or mast cell.

[0068] In another aspect, the invention is directed to an engineered antibody-like protein.

[0069] In another aspect, the invention is directed to a method for treating a disease in a subject comprising administering an antibody according to any claim above, to a person suffering from the disease, wherein the subject expresses MUC1 aberrantly. The disease may be cancer, such as breast cancer, ovarian cancer, pancreatic cancer, lung cancer, colon cancer, gastric cancer or esophageal cancer.

[0070] In another aspect, the invention is directed to an antibody, antibody fragment or scFv comprising variable domain fragments derived from an antibody that binds to an extracellular domain of MUC1 isoform or cleavage product that is devoid of the tandem repeat domains. In a preferred embodiment, the antibody or antibody fragment binds to the N-10 peptide (SEQ ID NO:3), but does not bind to the C-10 peptide (SEQ ID NO:825). The variable domain fragments may be derived from mouse monoclonal antibody MNE6 (SEQ ID NO:13 and 66) or from the humanized MNE6 (SEQ ID NO: 39 and 94), or from MNE6 scFv (SEQ ID NO: 233, 235 and 237). Or, the variable domain fragments may be derived from mouse monoclonal antibody MNC2 (SEQ ID NO: 119 and 169) or from the humanized MNC2 (SEQ ID NO: 145 and 195), or from MNC2 scFv (SEQ ID NO: 239, 241 and 243). Or, the variable domain may be derived from monoclonal antibodies MN18G12, MN20A10, MN25E6, MN28F9, MN5C6F3, MN3C2B1, or MN1E4. The heavy chain and light chain complementary determining region sequences for these antibodies are also set forth in the sequence listing herein.

[0071] In another aspect, the invention is directed to a method for the treatment of a person diagnosed with, suspected of having or at risk of developing a MUC1 or MUC1* positive cancer involving administering to the person an effective amount of the antibody, antibody fragment or scFv described above, wherein the species may be murine, camelid, human or humanized.

[0072] In another aspect, the invention is directed to a polypeptide comprising at least two different scFv sequences, wherein one of the scFv sequences is a sequence that binds to extracellular domain of MUC1 isoform or cleavage product that is devoid of the tandem repeat domains. The polypeptide may bind to
[0073] (i) PSMGFR region of MUC1;
[0074] (ii) PSMGFR peptide;
[0075] (iii) a peptide having amino acid sequence of QFNQYKTEAASRYNLTISDVSVSDVPFPFSAQSGA (N-10) (SEQ ID NO:3)
[0076] (iv) a peptide having amino acid sequence of
[0077] ASRYNLTISDVSVSDVPFPFSAQSGA (N-19) (SEQ ID NO:4)
[0078] (v) a peptide having amino acid sequence of
[0079] NLTISDVSVSDVPFPFSAQSGA (N-23) (SEQ ID NO:5)
[0080] (vi) a peptide having amino acid sequence of
[0081] ISDVSVSDVPFPFSAQSGA (N-26) (SEQ ID NO:6)
[0082] (vii) a peptide having amino acid sequence of
[0083] SVSDVPFPFSAQSGA (N-30) (SEQ ID NO:7)
[0084] (viii) a peptide having amino acid sequence of
[0085] QFNQYKTEAASRYNLTISDVSVSDVPFPFS (N-10/C-5) (SEQ ID NO:8)
[0086] (ix) a peptide having amino acid sequence of
[0087] ASRYNLTISDVSVSDVPFPFS (N-19/C-5) (SEQ ID NO:9)
[0088] (x) a peptide having amino acid sequence of
[0089] FPFSAQSGA (N-36) (SEQ ID NO:10)

[0090] In another aspect, the invention is directed to a method of detecting presence of a cell that expresses MUC1* aberrantly, comprising contacting a sample of cells or tissue with the antibody, antibody fragment or scFv-Fc described above and detecting for the presence of the binding of antibody, antibody fragment or scFv-Fc to the cell. The cell may be cancer cell.

[0091] In another aspect, the invention is directed to a method for testing a subject's cancer for suitability of treatment with a composition comprising antibodies of the invention, which may be murine, camelid, human or humanized, or fragments thereof, or portions of the variable regions of antibodies MNC2, MNE6, 20A10, 3C2B1, 5C6F3, 25E6, 18G12, 28F9, 1E4, B12, B2, B7, B9, 8C7F3, or H11, comprising the steps of contacting a bodily specimen from the patient, in vitro, ex-vivo, or in vivo, with the antibody and determining that the patient exhibits aberrant expression of MUC1* compared to normal tissue or specimen and concluding that the patient's cancer will beneficially respond to treatment with an agent comprising the antibody or a fragment thereof. The antibody used in these diagnostics may be conjugated to an imaging agent.

[0092] In another aspect, the invention is directed to a method of treating a subject suffering from a disease comprising, exposing immune cells, which may be T cells or NK cells from the subject, or from a donor, to MUC1* peptides wherein through various rounds of maturation, the T cells or NK cells develop MUC1* specific receptors, creating adapted T cells or NK cells, and expanding and administering the adapted cells to the donor patient who is diagnosed with, suspected of having, or is at risk of developing a MUC1* positive cancer. The MUC1* peptide is chosen from among the group:
[0093] (i) PSMGFR region of MUC1;
[0094] (ii) PSMGFR peptide;
[0095] (iii) a peptide having amino acid sequence of QFNQYKTEAASRYNLTISDVSVSDVPFPFSAQSGA (N-10)
[0096] (iv) a peptide having amino acid sequence of
[0097] ASRYNLTISDVSVSDVPFPFSAQSGA (N-19)
[0098] (v) a peptide having amino acid sequence of
[0099] NLTISDVSVSDVPFPFSAQSGA (N-23)
[0100] (vi) a peptide having amino acid sequence of
[0101] ISDVSVSDVPFPFSAQSGA (N-26)
[0102] (vii) a peptide having amino acid sequence of
[0103] SVSDVPFPFSAQSGA (N-30)
[0104] (viii) a peptide having amino acid sequence of
[0105] QFNQYKTEAASRYNLTISDVSVSDVPFPFS (N-10/C-5)
[0106] (ix) a peptide having amino acid sequence of
[0107] ASRYNLTISDVSVSDVPFPFS (N-19/C-5)
[0108] (x) a peptide having amino acid sequence of
[0109] FPFSAQSGA (N-36)

[0110] In one aspect of the invention, the antibody that is administered to a patient for the treatment or prevention of a MUC1 or MUC1* positive cancer is selected for its ability to bind to the N-10 peptide of the PSMGFR. The antibody can be administered alone, as a monovalent antibody, as an scFv, or a fragment of the antibody can be incorporated into a CAR, a BiTE or an ADC.

[0111] In another aspect of the invention, the antibody that is administered to a patient for the treatment or prevention of a MUC1 or MUC1* positive cancer is selected for its ability to bind to the QFNQYKTEAASRYNLTISDVSVSDVPFPFSAQSGA (N-10) peptide, wherein the presence of the FPFSAQSGA (N-36) sequence is required for binding. The antibody can be administered alone, as a monovalent antibody, as an scFv, or a fragment of the antibody can be incorporated into a CAR, a BiTE or an ADC.

[0112] In one aspect of the invention, the antibody that is administered to a patient for the treatment or prevention of a MUC1 or MUC1* positive cancer is selected for its inability to recognize a linear epitope of MUC1 or MUC1*. The antibody can be administered alone, as a monovalent antibody, as an scFv, or a fragment of the antibody can be incorporated into a CAR, a BiTE or an ADC.

[0113] In one aspect of the invention, the antibody that is administered to a patient for the treatment or prevention of a MUC1 or MUC1* positive cancer is selected for its ability to recognize the MUC1 transmembrane cleavage product after it has been cleaved by MMP9. The antibody can be administered alone, as an antibody, a monovalent antibody, as an scFv, a bispecific antibody, a multi-specific antibody, or a fragment of the antibody can be incorporated into a BiTE, an ADC, or a CAR which can be expressed in an immune cell.

[0114] In one aspect of the invention, the antibody that is administered to a patient for the treatment or prevention of a MUC1 or MUC1* positive cancer is selected for its ability to competitively inhibit the binding of NME7_{AB} or NME7-X1 to the extra cellular domain of a MUC1 that is devoid of tandem repeats. The antibody can be administered alone, as an antibody, a monovalent antibody, as an scFv, a bispecific antibody, a multi-specific antibody, or a fragment of the antibody can be incorporated into a BiTE, an ADC, or a CAR which can be expressed in an immune cell.

[0115] In another aspect, the invention is directed to a method of treating cancer in a patient comprising administering to the patient the antibody, antibody fragment, BiTE, ADC or CAR expressed in an immune cell of any of the above, in combination with a checkpoint inhibitor.

[0116] In the method above, any of the antibodies, or variable regions thereof, set forth in the following may be used: MNC2, MNE6, 20A10, 3C2B1, 5C6F3, 25E6, 18G12, 28F9, 1E4, B12, B2, B7, B9, 8C7F3, or H11.

[0117] In the method above, any of the variable regions set forth in the following may be used:
[0118] (i) an anti-MUC1* extracellular domain antibody or anti-N-10 antibody comprised of sequences of a humanized MN-E6 represented by humanized IgG2 heavy chain, or humanized IgG1 heavy chain, paired with humanized Kappa light chain, or humanized Lambda light chain;
[0119] (ii) an antibody of (i), wherein the humanized IgG2 heavy chain is SEQ ID NOS:53, humanized IgG1 heavy chain is SEQ ID NO:57, humanized Kappa light chain is SEQ ID NO:108, and humanized Lambda light chain is SEQ ID NO:112, or a sequence having 90%, 95% or 98% sequence identity thereof;
[0120] (iii) an anti-MUC1* extracellular domain antibody or anti-N-10 antibody comprised of sequences of a humanized MN-C2 represented by humanized IgG1 heavy chain, humanized IgG2 heavy chain, paired with humanized Lambda light chain, and humanized Kappa light chain;
[0121] (iv) an antibody of (iii), wherein the humanized IgG1 heavy chain MN-C2 (SEQ ID NOS:159) or IgG2 heavy chain (SEQ ID NOS:164) paired with Lambda light chain (SEQ ID NO:219) or Kappa light chain (SEQ ID NO:213), or a sequence having 90%, 95% or 98% sequence identity thereof;
[0122] In the method above, in the CAR, the extracellular domain may be comprised of humanized single chain antibody fragments of MNC2, MNE6, 20A10, 3C2B1, 5C6F3, 25E6, 18G12, 28F9, 1E4, B12, B2, B7, B9, 8C7F3, or H11. The extracellular domain may be comprised of humanized single chain antibody fragments of an MN-E6 scFv set forth as SEQ ID NOS: 233, 235, or 237), MN-C2 scFv (SEQ ID NOS:239, 241, or 243). In the CAR, the cytoplasmic tail may be comprised of one or more of signaling sequence motifs and co-stimulatory domains, including but not limited to CD3-zeta-1XX, CD27, CD28, 4-1BB, OX40, CD30, CD40, ICAm-1, LFA-1, ICOS, CD2, CD5, or CD7 and CD3-zeta or variants 1XX, X2X, XX3, 12X, or 23X. Additionally, the sequence of the intracellular signaling domain may contain mutations that dampen the signal to improve persistence or target cell killing.

[0123] The method above may include two CARs with different extracellular domain units transfected into the same cell. One of the extracellular domain recognition units may bind to MUC1* extracellular domain. One of the extracellular domain recognition units may bind to PD-1. One of the extracellular domain recognition units may be an antibody fragment and the other may be a peptide or an anti-MUC1* antibody fragment.

[0124] The method may include an immune cell transfected or transduced with a plasmid encoding a CAR and a plasmid encoding a non-CAR species that is expressed from an inducible promoter. The non-CAR species may be expressed from an inducible promoter that is activated by elements of an activated immune cell. The non-CAR species may be expressed from an NFAT inducible promoter. The NFAT may be NFATc1, NFATc3 or NFATc2. The cleavage enzyme may be MMP2, MMP3, MMP9, MMP13, MMP14, MMP16, ADAM10, ADAM17, or ADAM28, or a catalytically active fragment thereof. The non-CAR species may be a cytokine. The cytokine may be IL-7, IL-12, IL-15 or IL-18.

[0125] The present invention is directed to an antibody, or fragment thereof, for the diagnosis, treatment or prevention of cancers wherein the antibody specifically binds to the PSMGFR peptide (SEQ ID NO:2) or a fragment thereof of the peptide.

[0126] The antibody binds to the N-10 peptide (SEQ ID NO:3), N-19 peptide (SEQ ID NO:4), N-23 peptide (SEQ ID NO:5), N-26 peptide (SEQ ID NO:6), N-30 peptide (SEQ ID NO:7), N-10/C-5 peptide (SEQ ID NO:8), N-19/C-5 peptide (SEQ ID NO:9), or C-5 peptide (SEQ ID NO:825).

[0127] The antibody interacts with a peptide comprising conformational epitope SVSDV (SEQ ID NO:1751) and FPFSA (SEQ ID NO:1747) within N-26 sequence ISDVSVSDVPFPFSAQSGA (SEQ ID NO:6), wherein mutation or deletion of FPFS (SEQ ID NO:1747) destroys binding of the antibody or fragment thereof to the N-26 peptide.

[0128] The antibody interacts with a peptide comprising conformational epitope ASRYNLT (SEQ ID NO:1745), SVSDV (SEQ ID NO:1751), and FPFSA (SEQ ID NO:1747) within the N-19 sequence ASRYNLT ISDVSVSDVPFPFSAQSGA (SEQ ID NO:4), wherein mutation or deletion of ASRYNLT (SEQ ID NO:1745) destroys binding of the antibody or fragment thereof to the N-26 peptide.

[0129] The antibody does not bind to the C-10 peptide (SEQ ID NO:825).

[0130] The antibody binds to the N-10 peptide (SEQ ID NO:3), but not to the C-10 peptide (SEQ ID NO:825).

[0131] The antibody inhibits interaction between NME7_{AB} and MUC1*.

[0132] The antibody inhibits interaction between NME7_{AB} and PSMGFR peptide (SEQ ID NO:2).

[0133] The antibody inhibits interaction between NME7_{AB} and N-10 peptide (SEQ ID NO:3), N-19 peptide (SEQ ID NO:4), N-23 peptide (SEQ ID NO:5), N-26 peptide (SEQ ID NO:6), N-30 peptide (SEQ ID NO:7), N-10/C-5 peptide (SEQ ID NO:8), N-19/C-5 peptide (SEQ ID NO:9), or C-5 peptide (SEQ ID NO:825).

[0134] The antibody recognizes a MUC1 transmembrane enzymatic cleavage product.

[0135] In the above, the cleavage enzyme is MMP14 or MMP9 or a catalytically active fragment thereof of the enzyme.

[0136] The antibody binds to PSMGFR (SEQ ID NO:2) or fragment thereof in which presence of an amino acid sequence within PSMGFR (SEQ ID NO:2) induces binding of the antibody to the PSMGFR.

[0137] The amino acid sequence of the binding conformationally inducing peptide is present in N-10 peptide (SEQ ID NO:3).

[0138] The antibody does not bind to a linear form of the binding conformationally inducing peptide sequence wherein the linear form of the peptide is a denatured form.

[0139] The binding conformationally inducing peptide sequence is in the N-26 peptide sequence ISDVSVSDVPFPFSAQSGA (SEQ ID NO:6), wherein mutation or deletion of FPFS (SEQ ID NO:1747) destroys binding of the antibody or fragment thereof to the N-26 peptide.

[0140] The binding conformationally inducing peptide sequence is located within the N-19 sequence ASRYNLTISDVSVSDVPFPFSAQSGA (SEQ ID NO:4), wherein mutation or deletion of ASRYNLT (SEQ ID NO:1745) destroys binding of the antibody or fragment thereof to the N-19 peptide.

[0141] The binding inducing peptide sequence may be located within the N-26 sequence ISDVSVSDVPFPFSAQSGA (SEQ ID NO:6), wherein mutation or deletion within FPFS (SEQ ID NO:1747) destroys binding of the antibody or fragment thereof to PSMGFR.

[0142] The antibodies may have a consensus sequence.
[0143] heavy chain CDR1 comprises consensus sequence at least 90% identical to sequence: F or I at position 1, T at position 2, F at position 3, S at position 4, T, G, or R at position 5, Y at position 6, A, G or T at position 7, M at position 8 and S at position 9;
[0144] heavy Chain CDR2 comprises consensus sequence at least 90% identical to sequence: T at position 1, I or S at position 2, I or S at position 3, G or R at position 5, G or A at position 6, T or I at position 9, Y at position 10, Y at position 11, P or S at position12 and DSVKG for positions 13-17;
[0145] heavy chain CDR3 comprises consensus sequence at least 90% identical to sequence:_G, L, or N at position 2, G or T at position 4, Y at position 7, D or E at position 12, A at position 14, and Y at position 15;
[0146] light chain CDR1 comprises consensus sequence at least 90% identical to sequence: K or R at position 1, A or S at position 2, S at position 3, K or Q at position 4, S at position 5, L or V at position 6, L at position 7, T or S at position 10, Y at position 15, and I, L or M at position 16;
[0147] light Chain CDR2 comprises consensus sequence at least 90% identical to sequence: L or W, or S at position 1, A or T at position 2, S at position 3, N or T at position 4, L or R at position 5, E or A at position 6, and S at position 7; and
[0148] light chain CDR3 comprises consensus sequence at least 90% identical to sequence: Q at position 1, H or Q at position 2, S, Q or R at position 3, R, S or Y at position 4, E, L, or S at position 5, L or S at position 6, P or S at position 7, F or L at position 8 and T at position 9.

[0149] An antibody binding to a conformational epitope within a peptide having the N-26 sequence ISDVSVSDVPFPFSAQSGA (SEQ ID NO:6), wherein mutation or deletion within FPFS (SEQ ID NO: 1747), SVSDV (SEQ ID NO:1751), or ASRYNLT (SEQ ID NO: 1745) destroys binding of the antibody or fragment thereof to PSMGFR.

[0150] The antibody may have a further consensus sequence,
[0151] wherein
[0152] heavy chain CDR1 comprises consensus sequence at least 90% identical to sequence: F or I at position 1, T or A at position 2, F at position 3, S at position 4, T, G, or R at position 5, Y or F at position 6, A, G or T at position 7, M at position 8 and S at position 9;
[0153] heavy Chain CDR2 comprises consensus sequence at least 90% identical to sequence: T or A at position 1, I or S at position 2, I or S at position 3, N, S, T or G at position 4, G or R at position 5, G or A at position 6, G, T, or D at position 7, Y, K, H or S at position 8, T or I at position 9, Y or F at position 10, Y at position 11, P or S at position12 and D at position 13, S or T at position 14, V or L at position 15 and KG for positions 16-17;
[0154] heavy chain CDR3 comprises consensus sequence at least 90% identical to sequence: G, L, or N at position 2, G, T, or Y at position 3, G or T at position 4, Y at position 7, Y, A, or G at position 10, M, D or F at position 11, D or E at position 12 and AY at position 14-15;
[0155] light chain CDR1 comprises consensus sequence at least 90% identical to sequence: K or R at position 1, A or S at position 2, S or R at position 3, S, Y, I or V at position 8, T or S at position 10, G, S, D, or Q at position 12, V, Y, K or N at position 13, N, S, or T at position 14, Y or F at position 15, and I, L or M at position 16;
[0156] light Chain CDR2 comprises consensus sequence at least 90% identical to sequence: A, T or V at position 2, S at position 3, N, T, or K at position 4, L or R at position 5, E, A, F or D at position 6, and S at position 7; and
[0157] light chain CDR3 comprises consensus sequence at least 90% identical to sequence: Q, F or W at position 1, H or Q at position 2, R, S, T, Y or N at position 4, E, L, S or H at position 5, L, S, V, D or Y at position 6, P or S at position 7, and T at position 9.

[0158] The antibody above which may be MNC2, having
[0159] heavy chain CDR1 comprises consensus sequence FTFSGYAMS;
[0160] heavy Chain CDR2 comprises consensus sequence TISSGGTYIYYPDSVKG;
[0161] heavy chain CDR3 comprises consensus sequence -LGGDNYYEYFDV--;
[0162] light chain CDR1 comprises consensus sequence RASKS--VSTSGYSYMH;
[0163] light Chain CDR2 comprises consensus sequence LASNLES; and
[0164] light chain CDR3 comprises consensus sequence QHSRELPFT.
[0165] MNE6, having
[0166] heavy chain CDR1 comprises consensus sequence FTFSRYGMS;
[0167] heavy Chain CDR2 comprises consensus sequence TISGGGTYIYYPDSVKG;
[0168] heavy chain CDR3 comprises consensus sequence DNYGRNYDYGMDY--;
[0169] light chain CDR1 comprises consensus sequence -------SATSSVSYIH;
[0170] light Chain CDR2 comprises consensus sequence STSNLAS; and
[0171] light chain CDR3 comprises consensus sequence QQRSSSPFT.
[0172] B2, having
[0173] heavy chain CDR1 comprises consensus sequence FAFSTFAMS;
[0174] heavy Chain CDR2 comprises consensus sequence AISNGGGYTYYPDTLKG;
[0175] heavy chain CDR3 comprises consensus sequence ----RYYDLYFDL--;
[0176] light chain CDR1 comprises consensus sequence RSSQNIV-HSNGNTYLE;
[0177] light Chain CDR2 comprises consensus sequence KVSNRFS; and
[0178] light chain CDR3 comprises consensus sequence FQDSHVPLT.
[0179] B7, having
[0180] heavy chain CDR1 comprises consensus sequence FTFSRYGMS;
[0181] heavy Chain CDR2 comprises consensus sequence TISSGGTYIYYPDSVKG;
[0182] heavy chain CDR3 comprises consensus sequence DNYGSSYDYAMDY--;
[0183] light chain CDR1 comprises consensus sequence RSSQTIV-HSNGNTYLE;
[0184] light Chain CDR2 comprises consensus sequence KVSNRFS; and
[0185] light chain CDR3 comprises consensus sequence FQDSHVPLT.
[0186] B9, having
[0187] heavy chain CDR1 comprises consensus sequence FTFSRYGMS;
[0188] heavy Chain CDR2 comprises consensus sequence TISSGGTYIYYPDSVKG;
[0189] heavy chain CDR3 comprises consensus sequence DNYGSSYDYAMDY--;
[0190] light chain CDR1 comprises consensus sequence -------SASSSVSYMH;
[0191] light Chain CDR2 comprises consensus sequence TTSNLAS; and
[0192] light chain CDR3 comprises consensus sequence QQRSSYPF-.
[0193] 8C7F3, having
[0194] heavy chain CDR1 comprises consensus sequence FTFSTYAMS;
[0195] heavy Chain CDR2 comprises consensus sequence AISNGGGYTYYPDSLKG;
[0196] heavy chain CDR3 comprises consensus sequence ----RYYDHYFDY--;
[0197] light chain CDR1 comprises consensus sequence --RASESVATYGNNFMQ;
[0198] light Chain CDR2 comprises consensus sequence LASTLDS; and
[0199] light chain CDR3 comprises consensus sequence QQNNEDPPT.
[0200] H11, having
[0201] heavy chain CDR1 comprises consensus sequence FAFSTFAMS;
[0202] heavy Chain CDR2 comprises consensus sequence AISNGGGYTYYPDTLKG;
[0203] heavy chain CDR3 comprises consensus sequence ----RYYDLYFDL--;
[0204] light chain CDR1 comprises consensus sequence RSSQNIV-HSNGNTYLE;
[0205] light Chain CDR2 comprises consensus sequence KVSNRFS; and
[0206] light chain CDR3 comprises consensus sequence FQDSHVPLT.
[0207] B12, having
[0208] heavy chain CDR1 comprises consensus sequence SYGVH;
[0209] heavy Chain CDR2 comprises consensus sequence VIWPGGSTNYNSTLMSRM;
[0210] heavy chain CDR3 comprises consensus sequence DRTPRVGAWFAY; and
[0211] light chain CDR1 comprises consensus sequence RASESVATYGNNFMQ;
[0212] light Chain CDR2 comprises consensus sequence LASTLDS; and
[0213] light chain CDR3 comprises consensus sequence QQNNEDPPT.
[0214] 20A10, having
[0215] heavy chain CDR1 comprises consensus sequence FTFSTYAMS;
[0216] heavy Chain CDR2 comprises consensus sequence -SIGRAGSTYYSDSVKG;
[0217] heavy chain CDR3 comprises consensus sequence ---GPIYNDYDEFAY;
[0218] light chain CDR1 comprises consensus sequence KSSQSVLYSSNQKNYLA;
[0219] light Chain CDR2 comprises consensus sequence WASTRES; and
[0220] light chain CDR3 comprises consensus sequence HQYLSSLT.
[0221] 3C2B1, having
[0222] heavy chain CDR1 comprises consensus sequence ITFSTYTMS;
[0223] heavy Chain CDR2 comprises consensus sequence TISTGGDKTYYSDSVKG;
[0224] heavy chain CDR3 comprises consensus sequence -GTTAMYYYAMDY;
[0225] light chain CDR1 comprises consensus sequence RASKS---ISTSDYNYIH;
[0226] light Chain CDR2 comprises consensus sequence LASNLES; and
[0227] light chain CDR3 comprises consensus sequence QHSRELPLT.

[0228] In another aspect, the invention is directed to an antibody, or fragment thereof, for the diagnosis, treatment or prevention of cancers that requires presence of antibody binding conformationally inducing peptide ASRYNLT (SEQ ID NO:1745) of PSMGFR (SEQ ID NO:2). The antibody may be 25E6, having
[0229] heavy chain CDR1 comprises consensus sequence FTFSSYGMS;
[0230] heavy Chain CDR2 comprises consensus sequence TISNGGRHTFYPDSVKG;
[0231] heavy chain CDR3 comprises consensus sequence QTGTEGWFAY;
[0232] light chain CDR1 comprises consensus sequence KSSQSLLDSDGKTYLN;
[0233] light Chain CDR2 comprises consensus sequence LVSKLDS_; and
[0234] light chain CDR3 comprises consensus sequence WQGTHFPQT.

[0235] In another aspect, the invention is directed to an antibody, or fragment thereof, for the diagnosis, treatment or prevention of cancers that requires presence of antibody binding conformationally inducing peptide SVSDV (SEQ ID NO:1761) of PSMGFR (SEQ ID NO:2). The antibody may be 5C6F3, having
[0236] heavy chain CDR1 comprises consensus sequence FTFSTYAMS;
[0237] heavy Chain CDR2 comprises consensus sequence AISNGGGYTYYPDSLKG;
[0238] heavy chain CDR3 comprises consensus sequence RYYDHYFDY;
[0239] light chain CDR1 comprises consensus sequence RSSQTIVHSNGNTYLE;
[0240] light Chain CDR2 comprises consensus sequence KVSNRFS; and
[0241] light chain CDR3 comprises consensus sequence FQDSHVPLT.

[0242] The antibody or fragment thereof according all of the above may be murine, camelid, human or humanized. The antibody fragment may be scFv or scFv-Fc, which variable regions thereof may be murine, camelid, human or humanized.

[0243] In another aspect, the invention is directed to a chimeric antigen receptor (CAR) comprising the antibody fragments of above, and may further comprise mutations in the co-stimulatory domain or mutations or deletions of one or two of the ITAMs of the CD3-zeta signaling domain. Tyrosines may be mutated in CD28 or 4-1BB. CD3-zeta may contain a single ITAM such as only ITAM1 also known as 1XX, ITAM2 also known as X2X, or ITAM3 also known as XX3. In another aspect, CD3-zeta may contain two ITAMs, wherein the positions of the ITAMs may be moved to a more proximal position such as 12X or 23X (Feucht et al 2019). In yet another aspect, tyrosines of one or two ITAMs may be mutated to dampen signaling. In a preferred embodiment, the CD3-zeta domain is 1XX. An example of 1XX mutations, includes those exemplified in SEQ ID NOS: 1796-1797.

[0244] In another aspect, the invention is directed to an immune cell comprising the CAR of above. Immune cell may be T cell, NK cell, dendritic cell, or mast cell. In one aspect the immune cell is derived from a stem cell that has been directed to differentiate to that immune cell type in vitro. In another aspect, a CAR containing sequences of the antibody are expressed in a stem cell, which then may be differentiated into an immune cell.

[0245] In another aspect, the invention is directed to a cell composition expressed in a cell comprising a CARs of above, and second entity having a biological recognition unit that has a specificity that is different from that of the CAR. The second entity may bind PD-1, PDL-1, or other checkpoint inhibitor, or NME7, or a cytokine such as IL-12 or IL-18, or c-Jun.

[0246] In yet another aspect, the invention is directed to an immune cell engineered to express a nucleic encoding a CAR of above and a nucleic acid encoding a second entity as in any of the claims above wherein the second entity expressed from an inducible promoter. The second entity may be expressed from an inducible promoter that is activated by elements of an activated immune cell. The second entity may be expressed from an NFAT inducible promoter. NFAT may be NFATcT, NFATc3 or NFATc2. The second entity may be a cytokine such as IL-7, IL-15, or IL-18. The nucleic acids encoding the second entity may be inserted into a Foxp3 promoter or enhancer region, wherein the cytokine is IL-18. The cytokine may be expressed from an NFAT inducible promoter.

[0247] In another aspect, the invention is directed to a BiTE construct comprising the antibody fragment of above.

[0248] In yet another aspect, the invention is directed to an antibody drug conjugate (ADC) comprising the antibody or antibody fragment of above.

[0249] The present invention is directed to an antibody or fragment thereof that specifically:
[0250] (i) binds to PSMGFR (SEQ ID NO:2) and N-10 (SEQ ID NO:3); and
[0251] does not bind to full-length MUC1;
[0252] (ii) does not bind to C-10 (SEQ ID NO:825);
[0253] (iii) competitively inhibits binding of NME1 or NME7_{AB} to MUC1* extra cellular domain or a PSMGFR peptide;
[0254] (iv) recognizes a MUC1* generated by cleavage by a cleavage enzyme;
[0255] (v) recognizes a conformational epitope and not a linear epitope; or
[0256] (vi) is cancer selective by immunohistochemistry on tissues.

[0257] Four of the criteria (i)-(vi) may be satisfied. Five of the criteria (i)-(vi) may be satisfied. Six of the criteria (i)-(vi) may be satisfied. At least criteria (vi) may be satisfied. Cleavage enzyme may be MMP-9.

[0258] In all of the above, the cancer may be breast cancer, pancreatic cancer, ovarian cancer, lung cancer, colon cancer, gastric cancer or esophageal cancer.

[0259] The present invention is also directed to a method of diagnosing, treating or preventing cancer by administering the antibodies and fragments disclosed herein to a cancer patient in need thereof that has been identified as expressing MUC1 aberrantly and expressing truncated MUC1, such as MUC1*.

[0260] These and other objects of the invention will be more fully understood from the following description of the invention, the referenced drawings attached hereto and the claims appended hereto.

### BRIEF DESCRIPTION OF THE DRAWINGS

[0261] The patent or application file contains at least one drawing executed in color. Copies of this patent or patent application publication with color drawings will be provided by the Office upon request and payment of the necessary fee.

[0262] The present invention will become more fully understood from the detailed description given herein below, and the accompanying drawings which are given by way of illustration only, and thus are not limitative of the present invention, and wherein;

[0263] FIGS. 1A-1D show cell growth assay graphs of MUC1* positive cells treated with either bivalent ‘by’ anti-MUC1* antibody, monovalent ‘my’ or Fab, NM23-H1 dimers or NME7-AB. Bivalent anti-MUC1* antibodies stimulate growth of cancer cells whereas the monovalent Fab inhibits growth (FIG. TA-1B). Classic bell-shaped curve indicates ligand induced dimerization stimulates growth. Dimeric NM23-H1, aka NME1, stimulates growth of MUC1* positive cancer cells but siRNA to suppress MUC1 expression eliminate its effect (FIG. 1C). NME7-AB also stimulates the growth of MUC1* positive cells (FIG. 1D).

[0264] FIGS. 2A-2I show results of ELISA assays. MUC1* peptides PSMGFR, PSMGFR minus 10 amino acids from the N-terminus aka N-10, or PSMGFR minus 10 amino acids from the C-terminus, aka C-10 are immobilized on the plate and the following are assayed for binding: NME7-AB (FIG. 2A), MNC2 monoclonal antibody (FIG. 2B), MNE6 monoclonal antibody (FIG. 2C), or dimeric NME1 (FIG. 2D). These assays show that NME1, NME7-AB and monoclonal antibodies MNC2 and MNE6 all require the first membrane proximal 10 amino acids of the MUC1* extracellular domain to bind. MUC1* peptides PSMGFR minus 10 amino acids from the N-terminus aka N-10, or PSMGFR minus 10 amino acids from the C-terminus, aka C-10, are immobilized on the plate and the following are assayed for binding: MNC3 (FIG. 2E) and MNC8 (FIG. 2F). FIG. 2G shows the amino acid sequence of the PSMGFR peptide. FIG. 2H shows the amino acid sequence of the N-10 peptide. FIG. 2I shows the amino acid sequence of the C-10 peptide.

[0265] FIGS. 3A-3C show results of competitive ELISA assays. The PSMGFR MUC1* peptide is immobilized on the plate and dimeric NM23-H1, aka NME1, is added either alone or after the MNE6 antibody has been added (FIG. 3A). The same experiment was performed wherein NM23-H7, NME7-AB, is added alone or after MNE6 has been added (FIG. 3B). Results show that MNE6 competitively inhibits the binding of MUC1* activating ligands NME1 and NME7. In a similar experiment (FIG. 3C), PSMGFR or PSMGFR minus 10 amino acids from the N-terminus, aka N-10, is immobilized on the plate. Dimeric NM23-H1 is then added. Anti-MUC1* antibodies MNE6, MNC2, MNC3 or MNC8 are then tested for their ability to compete off the NM23-H1. Results show that although all three antibodies bind to the PSMGFR peptides, MNE6 and MNC2 competitively inhibit binding of the MUC1* activating ligands.

[0266] FIGS. 4A-4F show FACS scans of anti-MUC1* antibody huMNC2scFv binding specifically to MUC1* positive cancer cells and MUC1* transfected cells but not MUC1* or MUC1 negative cells. ZR-75-1, aka 1500, MUC1* positive breast cancer cells were stained with 1:2 or 1:10 dilutions of the 1.5 ug/ml humanized MNC2. After two washes, cells were stained with secondary antibody, Anti-Penta-His antibody conjugated to Alexa 488 (Qiagen) dilutions of 1:200 (FIG. 4A), 1:50 (FIG. 4B), or 1:10 (FIG. 4C) to detect the 6× His tag on the huMNC2 scFv. FIG. 4A shows huMNC2 binding to ZR-75-1 breast cancer cells where secondary antibody is added at a 1:200 dilution. FIG. 4B shows huMNC2 binding to ZR-75-1 breast cancer cells where secondary antibody is added at a 1:50 dilution. FIG. 4C shows huMNC2 binding to ZR-75-1 breast cancer cells where secondary antibody is added at a 1:10 dilution. Flow cytometric analysis revealed a concentration-dependent shift of a subset of cells, indicating specific binding, which is unseen in the absence of the MNC2 scFv (FIG. 4A-4C). FIG. 4D shows anti-MUC1* antibody MNE6 staining of MUC1 negative HCT-116 colon cancer cells transfected with the empty vector, single cell clone #8. FIG. 4E shows anti-MUC1* antibody MNE6 staining of HCT-116 colon cancer cells transfected with MUC1* single cell clone #10. FIG. 4F shows anti-MUC1* antibody MNE6 staining of ZR-75-1, aka 1500, MUC1* positive breast cancer cells. As the FACS scans show, both MNC2 and MNE6 only stain MUC1* positive cells and not MUC1 or MUC1* negative cells.

[0267] FIG. 5 shows a graph of an ELISA in which surface is coated with either the MUC1* PSMGFR peptide or a control peptide. Humanized MNC2 scFv is then incubated with the surface, washed and detected according to standard methods. The ELISA shows that the huMNC2 scFv binds to the MUC1* peptide with an EC-50 of about 333 nM.

[0268] FIGS. 6A-6B show graphs of cancer cell growth inhibition by MUC1* antibody variable region fragment humanized MNC2 scFv. hMNC2 scFv potently inhibited the growth of ZR-75-1, aka 1500, MUC1* positive breast cancer cells (FIG. 6A) and T47D MUC1* positive breast cancer cells (FIG. 6B) with approximately the same EC-50 as the in vitro ELISAs.

[0269] FIGS. 7A-7B show graphs of tumor growth in immune compromised mice that have been implanted with human tumors then treated with anti-MUC1* antibody MNE6 Fab or mock treatment. Female nu/nu mice implanted with 90-day estrogen pellets were implanted with 6 million T47D human breast cancer cells that had been mixed 50/50 with Matrigel. Mice bearing tumors that were at least 150 mm³ and had three successive increases in tumor volume were selected for treatment. Animals were injected sub cutaneously twice per week with 80 mg/kg MNE6 Fab and an equal number of mice fitting the same selection criteria were injected with vehicle alone (FIG. 7A). Male NOD/SCID mice were implanted with 6 million DU-145 human prostate cancer cells that had been mixed 50/50 with Matrigel. Mice bearing tumors that were at least 150 mm³ and had three successive increases in tumor volume were selected for treatment. Animals were injected sub-cutaneously every 48 hours with 160 mg/kg MNE6 Fab and an equal number of mice fitting the same selection criteria were injected with vehicle alone (FIG. 7B). Tumors were measured independently by two researchers twice per week and recorded. Statistics were blindly calculated by independent statistician, giving a P value of 0.0001 for each. Anti-MUC1* Fab inhibited breast cancer growth and prostate cancer growth. Treatment had no effect on weight, bone marrow cell type or number.

[0270] FIG. 8 shows a graph of an ELISA wherein the surface was immobilized with either PSMGFR peptide, PSMGFR minus 10 amino acids from the N-terminus or minus 10 amino acids from the C-terminus. The huMNE6 scFv-Fc bound to the PSMGFR peptide and to the PSMGFR N-10 peptide but not to the PSMGFR C-10 peptide. The parent MNE6 antibody and the humanized MNE6 require the C-terminal 10 amino acids of PSMGFR for binding.

[0271] FIGS. 9A-9B show graphs of ELISAs wherein the assay plate surface was immobilized with either PSMGFR peptide, PSMGFR minus 10 amino acids from the N-terminus or minus 10 amino acids from the C-terminus. The MNC3 antibody variants were then assayed for binding to the various MUC1* peptides. FIG. 9A shows purified mouse monoclonal MNC3 antibody; and FIG. 9B shows the humanized MNC3 scFv-Fc. ELISAs show binding to the PSMGFR peptide as well as to certain deletion peptides.

[0272] FIGS. 10A-10J. FIG. 10A10B are photographs of breast cancer tissue arrays. FIG. 10A was stained with VU4H5 which recognizes MUC1-FL (full length); FIG. 10B was stained with mouse monoclonal antibody MNC2 which recognizes cancerous MUC1*. Following automated staining (Clarient Diagnostics), the tissue staining was scored using Allred scoring method which combines an intensity score and a distribution score. FIG. 10C10F are color coded graphs showing the score calculated for MUC1 full-length staining for each patient's tissue. FIG. 10G10J are color coded graphs showing the score calculated for MUC1* staining for each patient's tissue.

[0273] FIGS. 11A-11J. FIG. 11A11B are photographs of breast cancer tissue arrays. FIG. 11A was stained with VU4H5 which recognizes MUC1-FL (full length); FIG. 11B was stained with mouse monoclonal antibody MNC2 which recognizes cancerous MUC1*. Following automated staining (Clarient Diagnostics), the tissue staining was scored using Allred scoring method which combines an intensity score and a distribution score. FIGS. 11C-11F are color coded graphs showing the score calculated for MUC1 full-length staining for each patient's tissue. FIGS. 11G-11J are color coded graphs showing the score calculated for MUC1* staining for each patient's tissue.

[0274] FIGS. 12A-12H show photographs of normal breast and breast cancer tissues stained with humanized MNE6-scFv-Fc biotinylated anti-MUC1* antibody at 2.5 ug/mL, then stained with a secondary streptavidin HRP antibody. FIG. 12A is a normal breast tissue.

[0275] FIGS. 12B-12D are breast cancer tissues from patients as denoted in the figure. FIGS. 12E-12H are photographs of the corresponding serial sections that were stained with the secondary antibody alone.

[0276] FIGS. 13A-13F show photographs of normal breast and breast cancer tissues stained with humanized MNE6-scFv-Fc biotinylated anti-MUC1* antibody at 2.5 ug/mL, then stained with a secondary streptavidin HRP antibody. FIG. 13A is a normal breast tissue.

[0277] FIGS. 13B-13C are breast cancer tissues from patients as denoted in the figure. FIGS. 13D-13F are photographs of the corresponding serial sections that were stained with the secondary antibody alone.

[0278] FIGS. 14A-14H show photographs of breast cancer tissues stained with MNE6 anti-MUC1* antibody at 10 ug/mL, then stained with a rabbit anti mouse secondary HRP antibody. FIGS. 14A-14D are breast cancer tissues from patient #300. FIGS. 14E-14H are breast cancer tissues from metastatic patient #291.

[0279] FIGS. 15A-15F show photographs of normal lung and lung cancer tissues stained with humanized MNE6-scFv-Fc biotinylated anti-MUC1* antibody at 2.5 ug/mL, then stained with a secondary streptavidin HRP antibody. FIG. 15A is a normal lung tissue.

[0280] FIG. 15B15C are lung cancer tissues from patients as denoted in the figure. FIGS. 15D-15F are photographs of the corresponding serial sections that were stained with the secondary antibody alone.

[0281] FIGS. 16A-16F show photographs of normal lung and lung cancer tissues stained with humanized MNE6-scFv-Fc biotinylated anti-MUC1* antibody at 2.5 ug/mL, then stained with a secondary streptavidin HRP antibody. FIG. 16A is a normal lung tissue.

[0282] FIG. 16B16C are lung cancer tissues from patients as denoted in the figure. FIGS. 16D-16F are photographs of the corresponding serial sections that were stained with the secondary antibody alone.

[0283] FIGS. 17A-17F show photographs of normal lung and lung cancer tissues stained with humanized MNE6-scFv-Fc biotinylated anti-MUC1* antibody at 25 ug/mL, then stained with a secondary streptavidin HRP antibody. FIG. 17A is a normal lung tissue. FIGS. 17B-17C are lung cancer tissues from patients as denoted in the figure. FIGS. 17D-17F are photographs of the corresponding serial sections that were stained with the secondary antibody alone.

[0284] FIGS. 18A-18F show photographs of normal lung and lung cancer tissues stained with humanized MNE6-scFv-Fc biotinylated anti-MUC1* antibody at 25 ug/mL, then stained with a secondary streptavidin HRP antibody. FIG. 18A is a normal lung tissue. FIGS. 18B-18C are lung cancer tissues from patients as denoted in the figure. FIGS. 18D-18F are photographs of the corresponding serial sections that were stained with the secondary antibody alone.

[0285] FIGS. 19A-19D show photographs of normal small intestine and cancerous small intestine tissues stained with humanized MNE6-scFv-Fc biotinylated anti-MUC1* antibody at 5 ug/mL, then stained with a secondary streptavidin HRP antibody. FIG. 19A is a normal small intestine tissue. FIG. 19B is small intestine cancer from patient as denoted in the figure. FIGS. 19C-19D are photographs of the corresponding serial sections that were stained with the secondary antibody alone.

[0286] FIGS. 20A-20H show photographs of normal small intestine tissues stained with humanized MNE6-scFv-Fc anti-MUC1* antibody at 50 ug/mL, then stained with a secondary goat-anti-human HRP antibody. FIGS. 20A-20D are normal small intestine tissue. FIGS. 20E-20H are photographs of the corresponding serial sections that were stained with the secondary antibody alone.

[0287] FIGS. 21A-21H show photographs of cancerous small intestine tissues stained with humanized MNE6-scFv-Fc anti-MUC1* antibody at 50 ug/mL, then stained with a secondary goat-anti-human HRP antibody. FIGS. 21A-21D are cancerous small intestine tissue from a patient as denoted in figure. FIGS. 21E-21H are photographs of the corresponding serial sections that were stained with the secondary antibody alone.

[0288] FIGS. 22A-22H show photographs of cancerous small intestine tissues stained with humanized MNE6-scFv-Fc anti-MUC1* antibody at 50 ug/mL, then stained with a secondary goat-anti-human HRP antibody. FIGS. 22A-22D are cancerous small intestine tissue from a patient as denoted in figure. FIGS. 22E-22H are photographs of the corresponding serial sections that were stained with the secondary antibody alone.

[0289] FIGS. 23A-23H show photographs of normal colon tissues stained with humanized MNE6-scFv-Fc anti-MUC1* antibody at 50 ug/mL, then stained with a secondary goat-anti-human HRP antibody. FIGS. 23A-23D are normal colon. FIGS. 23E-23H are photographs of the corresponding serial sections that were stained with the secondary antibody alone.

[0290] FIGS. 24A-24H show photographs of colon cancer tissues stained with humanized MNE6-scFv-Fc anti-MUC1* antibody at 50 ug/mL, then stained with a secondary goat-anti-human HRP antibody. FIGS. 24A-24D are colon cancer tissue from a metastatic patient as denoted in figure. FIGS. 24E-24H are photographs of the corresponding serial sections that were stained with the secondary antibody alone.

[0291] FIGS. 25A-25H show photographs of colon cancer tissues stained with humanized MNE6-scFv-Fc anti-MUC1* antibody at 50 ug/mL, then stained with a secondary goat-anti-human HRP antibody. FIGS. 25A-25D are colon cancer tissue from a Grade 2 patient as denoted in figure. FIGS. 25E-25H are photographs of the corresponding serial sections that were stained with the secondary antibody alone.

[0292] FIGS. 26A-26H show photographs of colon cancer tissues stained with humanized MNE6-scFv-Fc anti-MUC1* antibody at 50 ug/mL, then stained with a secondary goat-anti-human HRP antibody. FIGS. 26A-26D are colon cancer tissue from a metastatic patient as denoted in figure. FIGS. 26E-26H are photographs of the corresponding serial sections that were stained with the secondary antibody alone.

[0293] FIGS. 27A-27H show photographs of prostate cancer tissues stained with humanized MNE6-scFv-Fc anti-MUC1* antibody at 50 ug/mL, then stained with a secondary goat-anti-human HRP antibody. FIGS. 27A-27D are prostate cancer tissue from a patient as denoted in figure. FIGS. 27E-27H are photographs of the corresponding serial sections that were stained with the secondary antibody alone.

[0294] FIGS. 28A-28H show photographs of prostate cancer tissues stained with humanized MNE6-scFv-Fc anti-MUC1* antibody at 50 ug/mL, then stained with a secondary goat-anti-human HRP antibody. FIGS. 28A-28D are prostate cancer tissue from a patient as denoted in figure. FIGS. 28E-28H are photographs of the corresponding serial sections that were stained with the secondary antibody alone.

[0295] FIGS. 29A-29H show photographs of prostate cancer tissues stained with humanized MNE6-scFv-Fc anti-MUC1* antibody at 50 ug/mL, then stained with a secondary goat-anti-human HRP antibody. FIGS. 29A-29D are prostate cancer tissue from a patient as denoted in figure. FIGS. 29E-29H are photographs of the corresponding serial sections that were stained with the secondary antibody alone.

[0296] FIGS. 30A-30F show photographs of a triple negative breast cancer array stained with anti-MUC1* antibody huMNC2scFv. The first score shown is the Allred score and the second is the tumor grade. The percentage of the array that scored zero, weak, medium or strong is graphed as a pie chart. FIG. 30A shows the pie chart of score of anti-MUC1* antibody staining. FIG. 30B shows a photograph of the array stained with the antibody. FIGS. 30C-30D show magnified photographs of two of the breast cancer specimens from the array. FIGS. 30E-30F show more magnified photographs of the portion of the specimen that is marked by a box.

[0297] FIGS. 31A-31F show photographs of an ovarian cancer array stained with anti-MUC1* antibody huMNC2scFv. The first score shown is the Allred score and the second is the tumor grade. The percentage of the array that scored zero, weak, medium or strong is graphed as a pie chart. FIG. 31A shows the pie chart of score of anti-MUC1* antibody staining. FIG. 31B shows a photograph of the array stained with the antibody. FIGS. 31C-31D show magnified photographs of two of the breast cancer specimens from the array. FIGS. 31E-31F show more magnified photographs of the portion of the specimen that is marked by a box.

[0298] FIGS. 32A-32F show photographs of a pancreatic cancer array stained with anti-MUC1* antibody huMNC2scFv. The first score shown is the Allred score and the second is the tumor grade. The percentage of the array that scored zero, weak, medium or strong is graphed as a pie chart. FIG. 32A shows the pie chart of score of anti-MUC1* antibody staining. FIG. 32B shows a photograph of the array stained with the antibody. FIGS. 32C-32D show magnified photographs of two of the breast cancer specimens from the array. FIGS. 32E-32F show more magnified photographs of the portion of the specimen that is marked by a box.

[0299] FIGS. 33A-33F show photographs of a lung cancer array stained with anti-MUC1* antibody huMNC2scFv. The first score shown is the Allred score and the second is the tumor grade. The percentage of the array that scored zero, weak, medium or strong is graphed as a pie chart. FIG. 33A shows the pie chart of score of anti-MUC1* antibody staining. FIG. 33B shows a photograph of the array stained with the antibody. FIGS. 33C-33D show magnified photographs of two of the breast cancer specimens from the array. FIGS. 33E-33F show more magnified photographs of the portion of the specimen that is marked by a box.

[0300] FIGS. 34A-34I show photographs of normal tissues stained with anti-MUC1* antibody huMNC2scFv.

[0301] FIGS. 35A-35D show FACS scans of cells expressing either no MUC1, MUC1* or full-length MUC1, wherein the cells were probed with either MNC2 or VU4H5. FIG. 35A shows MUC1 negative HCT-116 colon cancer cells probed with antibody MNC2. FIG. 35B shows HCT cells that have been transfected with MUC1* wherein the extra cellular domain is just the sequence of the PSMGFR peptide wherein the cells are probed with antibody MNC2. FIG. 35C shows HCT-MUC1-18 cells which are a cleavage resistant single cell clone of HCT cells transfected with full-length MUC1, also referred to herein as HCT-MUC1-41TR, and cells were probed with antibody MNC2. FIG. 35D shows HCT-MUC1-18 cells probed with antibody VU4H5 which is an antibody that recognizes the hundreds of tandem repeats epitopes in full-length MUC1. As can be seen in the figures, MNC2 recognizes an ectopic epitope that is not accessible in full-length MUC1.

[0302] FIGS. 36A-36D show Western blots and corresponding FACs analysis of HCT-116 cells which are a MUC1 negative colon cancer cell line, that were then stably transfected with either MUC1* or MUC1 full-length. The single cell clones that are shown are HCT-MUC1-41TR, and HCT-MUC1*. FIG. 36A shows a Western blot of the parent cell line HCT-116, HCT-MUC1-41TR and HCT-MUC1* wherein the gel has been probed with a rabbit polyclonal antibody, SDIX, that only recognizes cleaved MUC1. A visible band between 25 and 35 kDa can be readily seen in Lane 6, loaded with HCT-MUC1*, whereas there is only a faint band in Lanes 4 and 5, showing that only a small amount of MUC1 is cleaved in the HCT-MUC1-41Tr cells. There is no cleaved MUC1 present in the parent cell line HCT-116 loaded into Lanes 2 and 3. FIG. 36B is a Western blot that was probed with a mouse monoclonal antibody VU4H5 that recognizes the tandem repeats of full-length MUC1. As can be seen, only HCT-MUC1-41TR contains full-length MUC1. FIG. 36C shows FACS scans showing that HCT-MUC1* is 95.7% positive for SDIX which only binds to MUC1* and essentially not at all for MUC1 full-length. FIG. 36D shows FACS scans that show that HCT-MUC1-41TR cells are 95% positive for full-length MUC1 and only about 11% positive for the cleaved form, MUC1*.

[0303] FIG. 37A-37C shows western blots and a bar graph of FACS analysis assessing the ability of MNC2 to recognize a full-length MUC1 after it has been cleaved by MMP9. FIG. 37A shows a Western blot of HCT-MUC1-18 cells, which are a cleavage resistant cell line, to which was added cleavage enzyme MMP9. The cell lysate fraction was run on a gel and probed with a polyclonal anti-PSMGFR antibody. The photo shows that in a dose dependent manner, MMP9 cleaved MUC1 to MUC1*, the −25 kDa species. FIG. 37B shows the Western blot of the conditioned media from the same experiment. The photo shows that the addition of cleavage enzyme MMP9, in a dose dependent manner, increased the release of the tandem repeat domain into the conditioned media. FIG. 37C shows FACS analysis of the experiment. The graphs show that the addition of MMP9, in a dose dependent manner, increased recognition of the cleavage product by anti-MUC1* antibody MNC2 and decreased the recognition of the full-length MUC1 which contains the tandem repeat domain.

[0304] FIG. 38 shows a photograph of a Western blot in which HCT-MUC1-18 cells, labeled here as HCT-18, a cleavage resistant single cell clone of HCT cells transfected with full-length MUC1, are treated with varying amounts of a catalytically active ADAM17 or MMP14. Shed MUC1 tandem repeat domain of full-length MUC1 is immunoprecipitated from the conditioned media, and run on a gel that is then probed with VU4H5 that binds to the tandem repeat epitopes. As can be seen, MMP14 also efficiently cleaves MUC1 full-length and sheds the tandem repeat containing extra cellular domain into the conditioned media. Cleavage enzyme ADAM17 did not cleave MUC1.

[0305] FIG. 39A-39B shows fluorescence activated cell sorting (FACS) measurements of human CD34+ hematopoietic stem cells of human bone marrow stained with anti-MUC1* monoclonal antibodies MNC3, MNC2, MNE6 or an isotype control antibody. The histogram of the FACS assay and the bar graph showing the data show that the MUC1* positive cells of the bone marrow are recognized by one anti-MUC1* antibody, MNC3 but not by MNE6 or MNC2. All three antibodies bind to the PSMGFR peptide. The great difference in the specificity of these antibodies suggests that MNC3 recognizes a MUC1*-like form created when MUC1 is cleaved by an enzyme that is different from MMP9.

[0306] FIG. 40A-40G shows the details of FACS analysis of the hematopoietic stem cells probed with either MNC3 or MNE6. FIG. 40A shows the FACS scatter plot of total bone marrow cells. FIG. 40B shows the FACS scatter plot of the CD34+ cells. FIG. 40C shows the FACS histogram of the CD34+ cells. FIG. 40D shows the FACS scatter plot of the earliest hematopoietic stem cells, which are CD34+/CD38−, stained with either MNC3 or MNE6. FIG. 40E shows the histogram of the experiment. FIG. 40F shows the histogram overlay of MNC3 binding to CD34+/CD38−cells versus MNE6. FIG. 40G shows the bar graph of that FACS experiment.

[0307] FIG. 41A-42H shows the details of FACS analysis of CD34+/CD38^{-/lo} hematopoietic stem cells probed with a polyclonal anti-PSMGFR antibody SDIX, MNE6 or MNC2. FIG. 41A shows the FACS scatter plot of the CD34+/CD38^{-/lo} population of cells. FIG. 41E shows a table of the detailed analysis. FIG. 41B shows the FACS scatter plot of the CD34+/CD38^{-/lo} population of cells probed with the anti-PSMGFR polyclonal antibody SDIX. FIG. 41F shows a table of the detailed analysis. FIG. 41C shows the FACS scatter plot of the CD34+/CD38^{-/lo} population of cells probed with MNE6. FIG. 41G shows a table of the detailed analysis. FIG. 41D shows the FACS scatter plot of the CD34+/CD38^{-/lo} population of cells probed with MNC2. FIG. 41H shows a table of the detailed analysis.

[0308] FIG. 42A-42H shows photographs of DU145 prostate cancer cells or T47D breast cancer cells that have been treated with either the Fab of anti-MUC1* antibody MNC2, MNE6, MNC3 or MNC8. The images show that cancer specific antibodies MNC2 and MNE6 effectively kill prostate and breast cancer cells while the monoclonal antibodies MNC3 and MNC8 do not.

[0309] FIG. 43 shows a graph of a PCR experiment comparing expression of a wide range of cleavage enzymes expressed in different cells lines, wherein the values have been normalized to those expressed in breast cancer cell line T47D. Cell lines that are compared are prostate cancer cell line DU145, HCT-MUC1-41TR that is a MUC1 negative colon cancer cell line transfected with a MUC1 whose extracellular domain is truncated after 41 tandem repeat units and that is not cleaved to the MUC1* form, T47D breast cancer cell line and CD34+ bone marrow cells.

[0310] FIG. 43 shows a graph of a PCR experiment in which the expression levels of various cleavage enzymes are measured in DU145 prostate cancer cells, HCT116+ MUC1FL, also known as HCT-MUC1-18 a cell line expressing full-length MUC1, T47D breast cancer cells, and CD34+ hematopoietic stem cells of the bone marrow. The fold expression is relative to the expression of each cleavage enzyme in T47D breast cancer cells, set as 1.

[0311] FIG. 44 shows the graph of the PCR experiment of FIG. 43 but with the Y-axis maximum set to 5.

[0312] FIGS. 45A-45P show photographs of a CAR T co-culture assay in which the targeting antibody fragment of the CAR is huMNC2scFv wherein CAR44 has a CD8 transmembrane domain, followed by 41BB-3zeta and CAR50 has a CD4 transmembrane domain, followed by 41BB-3zeta. The target cancer cells are: HCT-FLR which is HCT-116 cells transfected with MUC1*45 and HCT-MUC1-41TR, which is a stable single cell clone HCT-116 cell line that expresses MUC1 with an extracellular domain truncated after 41 tandem repeats and that does not get cleaved to the MUC1* form on its own. The HCT-MUC1-41TR cancer cells were also incubated with conditioned media from cells transfected with MMP9 or ADAM17 before co-culture with the CAR T cells. Conditioned media of the MMP9 or ADAM17 expressing cells were also incubated with APMA which is an activator of those cleavage enzymes. The images shown are an overlay of the 4× bright field image and the fluorescent image of the same showing cancer cells dyed with a red CMTMR lipophilic dye. FIGS. 45A, 45E, 45I, 45M show photographs of cells co-cultured with untransduced human T cells. FIGS. 45B, 45F, 45J, 45N show photographs of cells co-cultured with human T cells transduced with anti-MUC1* CAR44 at an MOI of 10. FIGS. 45C, 45G, 45K, 450 show photographs of cells co-cultured with human T cells transduced with anti-MUC1* CAR50 at an MOI of 10. FIGS. 45D, 45H, 45L, 45P show photographs of cells co-cultured with human T cells transduced with anti-MUC1* CAR44 at an MOI of 50, which increases transduction efficiency. FIGS. 45B, 45C, 45D show that both CAR44 and CAR50 transduced T cells recognized MUC1* expressed in these cancer cells, bound to them, induced clustering and killed many cancer cells. FIGS. 45F, 45G, 45H show that neither CAR44 nor CAR50 transduced T cells recognize full-length MUC1 expressed in HCT-MUC1-41TR cancer cells. There is no T cell induced clustering and the number of cancer cells has not decreased. FIGS. 45J, 45K, 45L show that activated MMP9 has cleaved full-length MUC1 to a MUC1* form that is recognized by both CAR44 and CAR50 transduced T cells. There is clearly visible CAR T cell induced clustering and a decrease in the number of cancer cells as they are killed. FIGS. 45N, 450, 45P show that activated ADAM17 has either not cleaved MUC1 or cleaved it at a position not recognized by MNC2. Neither huMNC2-CAR44 nor huMNC2-CAR50 transduced T cells recognized these cancer cells.

[0313] FIG. 46A-46T shows photographs of a CAR T co-culture assay in which the targeting antibody fragment of the CAR is MNC2 scFv wherein CAR44 has a CD8 transmembrane domain, followed by 41BB-3zeta and CAR50 has a CD4 transmembrane domain, followed by 41BB-3zeta. The target cancer cells are breast cancer T47D cells that were also incubated with conditioned media from cells transfected with MMP2, MMP9 or ADAM17 before co-culture with the MNC2-CAR T cells. In some cases, the conditioned media of the MMP2 and MMP9 expressing cells were also incubated with APMA, which is an activator of these cleavage enzymes. The images shown are an overlay of the 4× bright field image and the fluorescent image of the same showing cancer cells dyed with a red CMTMR lipophilic dye. As can be seen, the MNC2-CAR T cells only bind to and attack the target cancer cells that express the cleaved form, MUC1*.

[0314] FIGS. 47A-47I show photographs of cancer cells co-cultured with anti-MUC1* CAR T cells, wherein some of the cancer cells were pre-incubated with activated MMP9 prior to co-culture with the CAR T cells. The cancer cells shown in FIGS. 47A-47C are MUC1 negative colon cancer cell line HCT-116 that have been stably transfected to express MUC1*. The cancer cells shown in FIGS. 47D-47F are MUC1 positive breast cancer cell line T47Ds that express high levels of both MUC1 full-length and MUC1*. The cancer cells shown in FIGS. 47G-47I are MUC1 positive breast cancer cell line T47Ds that were pre-incubated with activated MMP9. The cells shown in FIGS. 47A, 47D and 47G were co-cultured with untransduced human T cells and are the controls. The cells shown in FIGS. 47B, 47E and 47H were co-cultured with human T cells that were transduced with huMNC2-CAR44 at an MOI of 10, wherein MOI stands for multiplicity of infection and the higher the MOI the more CARs are expressed on the T cells. The cells shown in FIGS. 47C, 47F and 47I were co-cultured with human T cells that were transduced with huMNC2-CAR44 at an MOI of 50. As can be seen in the photographs, the CAR44 T cells bind to the target MUC1* positive cancer cells, surrounding and killing them. Comparing the photograph FIG. 47I with the others, it can be seen that the cells that were pre-incubated with MMP9 become much more susceptible to CAR T killing when the antibody targeting head of the CAR recognizes MUC1*. It also demonstrates that MUC1 cleaved by MMP9 is recognized by huMNC2scFv.

[0315] FIG. 48 shows an xCelligence graph of T47D breast cancer cells in co-culture with either untransduced T cells, as a control, or huMNC2-CAR44 T cells over a 45 hour period. After 18 hours of cancer cell growth, a catalytic sub-unit MMP9 was added to some of the cells. At 25 hours, T cells were added. As can be seen, huMNC2-CAR44 T cell killing is greatly improved when the T47D cells are pre-incubated with cleavage enzyme MMP9. In the xCelligence system, target cancer cells, which are adherent, are plated onto electrode array plates. Adherent cells insulate the electrode and increase the impedance. The number of adherent cancer cells is directly proportional to impedance. T cells are not adherent and do not contribute to impedance. Therefore, increasing impedance reflects growth of cancer cells and decreasing impedance reflects killing of cancer cells.

[0316] FIG. 49 shows an xCelligence graph of DU145 prostate cancer cells in co-culture with either untransduced T cells, as a control, or huMNC2-CAR44 T cells over a 45 hour period. After 18 hours of cancer cell growth, a catalytic sub-unit MMP9 was added to some of the cells. At 25 hours, T cells were added. As can be seen, huMNC2-CAR44 T cell killing is not affected by pre-incubation with cleavage enzyme MMP9. DU145 cancer cells express a significantly lower amount of MUC1 which includes the full-length form as well as MUC1*. The lower density of MUC1 full-length does not sterically hinder T cell access to the membrane proximal MUC1*.

[0317] FIG. 50 shows a bar graph of a PCR experiment measuring the amount of MUC1 expressed by a panel of cell lines and primary cells, comprised of normal cells as well as cancer cells.

[0318] FIG. 51A-51B shows a bar graph of an ELISA assay measuring the amount of interferon gamma, IFN-g, secreted by huMNC2-CAR44 human T cells after co-culture with the normal cells or the HCT-MUC1* cancer cells for 72 hours. FIG. 51A shows the results of the experiment where the CAR44 T cell to target cell ratio was 1:1. FIG. 51B shows the results of the experiment where the CAR44 T cell to target cell ratio was 0.5:1.

[0319] FIG. 52A-52B shows a bar graph of an ELISA assay measuring the amount of interleukin-2, IL-2, secreted by huMNC2-CAR44 human T cells after co-culture with the normal cells or the HCT-MUC1* cancer cells for 72 hours. FIG. 52A shows the results of the experiment where the CAR44 T cell to target cell ratio was 1:1. FIG. 52B shows the results of the experiment where the CAR44 T cell to target cell ratio was 0.5:1.

[0320] FIG. 53A-53J shows bar graphs of FACS analysis of live versus dead markers and photographs of normal cells versus cancer cells after co-culture with huMNC2-CAR44 T cells. FIG. 53A.1 shows the bar graph of FACS analysis of live versus dead cells after HCT-MUC1* cancer cells were co-cultured with huMNC2-CAR44 T cells. FIG. 53A.2 and FIG. 53A.3 show the photographs of the experiment described in FIG. 53A.1. FIG. 53B.1 shows the bar graph of FACS analysis of live versus dead cells after MCF-12A normal breast cells were co-cultured with huMNC2-CAR44 T cells. FIG. 53B.2 and FIG. 53B.3 show the photographs of the experiment described in FIG. 53B.1. FIG. 53C.1 shows the bar graph of FACS analysis of live versus dead cells after THLE-3 normal liver cells were co-cultured with huMNC2-CAR44 T cells. FIG. 53C.2 and FIG. 53C.3 show the photographs of the experiment described in FIG. 53C.1. FIG. 53D.1 shows the bar graph of FACS analysis of live versus dead cells after T/G HA-HSMC normal heart cells were co-cultured with huMNC2-CAR44 T cells. FIG. 53D.2 and FIG. 53D.3 show the photographs of the experiment described in FIG. 53D.1. FIG. 53E.1 shows the bar graph of FACS analysis of live versus dead cells after Hs1.Tes normal testes cells were co-cultured with huMNC2-CAR44 T cells. FIG. 53E.2 and FIG. 53E.3 show the photographs of the experiment described in FIG. 53E.1. FIG. 53F.1 shows the bar graph of FACS analysis of live versus dead cells after HEK-293 MUC1 negative cells were co-cultured with huMNC2-CAR44 T cells. FIG. 53F.2 and FIG. 53F.3 show the photographs of the experiment described in FIG. 53F.1. FIG. 53G.1 shows the bar graph of FACS analysis of live versus dead cells after HRCE normal kidney cells were co-cultured with huMNC2-CAR44 T cells. FIG. 53G.2 and FIG. 53G.3 show the photographs of the experiment described in FIG. 53G.1. FIG. 53H.1 shows the bar graph of FACS analysis of live versus dead cells after CCD-18Lu normal lung cells were co-cultured with huMNC2-CAR44 T cells. FIG. 53H.2 and FIG. 53H.3 show the photographs of the experiment described in FIG. 53H.1. FIG. 53I.1 shows the bar graph of FACS analysis of live versus dead cells after HBEC-5i normal brain cells were co-cultured with huMNC2-CAR44 T cells. FIG. 53I.2 and FIG. 53I.3 show the photographs of the experiment described in FIG. 53I.1. FIG. 53J.1 shows the bar graph of FACS analysis of live versus dead cells after Hs.738.St/Int normal stomach and intestine cells were co-cultured with huMNC2-CAR44 T cells. FIG. 53J.2 and FIG. 53J.3 show the photographs of the experiment described in FIG. 53J.1.

[0321] FIG. 54 shows photographs of a breast cancer tissue array in which for each patient there is a specimen from the primary tumor plus a specimen from that patient's metastasis. As can be seen in the figure, most often the metastasis expresses more MUC1* than the primary tumor.

[0322] FIGS. 55A-55H show the cytotoxic effect of huMNC2-CAR44 T cells on MUC1* positive DU145 prostate cancer cells as measured by a variety of assays. FIG. 55A is a fluorescent photograph of untransduced T cells co-cultured with the prostate cancer cells, wherein granzyme B is stained with a red fluorophore. FIG. 55B shows merging of DAPI and granzyme B. FIG. 55C is a fluorescent photograph of huMNC2-CAR44 T cells co-cultured with the prostate cancer cells, wherein granzyme B is stained with a red fluorophore. FIG. 55D shows merging of DAPI and granzyme B. FIG. 55E is a FACS scan for fluorescently labeled granzyme B for untransduced T cells incubated with the cancer cells. FIG. 55F is a FACS scan showing a positive increase in fluorescently labeled granzyme B for huMNC2-CAR44 T cells incubated with the cancer cells. FIG. 55G is a graph of the mean fluorescent intensity. FIG. 55H is an xCELLigence scan tracking the real-time killing of DU145 cancer cells by huMNC2-CAR44 T cells (blue trace) but not by untransduced T cells (green).

[0323] FIGS. 56A-56H show the cytotoxic effect of huMNC2-CAR44 T cells on MUC1* positive CAPAN-2 pancreatic cancer cells as measured by a variety of assays. FIG. 56A is a fluorescent photograph of untransduced T cells co-cultured with the pancreatic cancer cells, wherein granzyme B is stained with a red fluorophore. FIG. 56B shows merging of DAPI and granzyme B. FIG. 56C is a fluorescent photograph of huMNC2-CAR44 T cells co-cultured with the pancreatic cancer cells, wherein granzyme B is stained with a red fluorophore. FIG. 56D shows merging of DAPI and granzyme B. FIG. 56E is a FACS scan for fluorescently labeled granzyme B for untransduced T cells incubated with the cancer cells. FIG. 56F is a FACS scan showing a positive increase in fluorescently labeled granzyme B for huMNC2-CAR44 T cells incubated with the cancer cells. FIG. 56G is a graph of the mean fluorescent intensity. FIG. 56H is an xCELLigence scan tracking the real-time killing of CAPAN-2 cancer cells by huMNC2-CAR44 T cells (blue trace) but not by untransduced T cells (green).

[0324] FIGS. 57A-57C show xCELLigence scans tracking the real-time killing of MUC1* positive cancer cells, but not MUC1* negative cells, by huMNC2-CAR44 T cells. FIG. 57A shows that huMNC2-CAR44 T cells effectively kill HCT colon cancer cells that have been stably transfected with MUC1*. FIG. 57B shows that huMNC2-CAR44 T cells have almost no effect on HCT-MUC1-41TR, which is a MUC1 negative cancer cell that has been stably transfected with a MUC1 full-length. In this cell line only about 10% of the cells have MUC1 cleaved to MUC1*. FIG. 57C shows that huMNC2-CAR44 T cells have no effect on HCT-116 cells, which is a MUC1 negative colon cancer cell line.

[0325] FIG. 58A-58F shows photographs NOD/SCID/GAMMA mice in an IVIS instrument measuring photon emission from tumor cells after mice were treated with nothing, PBS, untransduced human T cells or huMNC2-CAR44 T cells. Mice had been injected sub-cutaneously with HCT-MUC1* tumor cells that had been made Luciferase positive. Ten (10) minutes before the IVIS photographs were taken, the mice were injected into the intraperitoneal (ip) space with the Luciferase substrate, Luciferin. FIG. 58A shows the tumor bearing mice that had only been treated with phosphate buffered saline, PBS. FIG. 58B shows the tumor bearing mice that had only been treated with untransduced T cells. FIG. 58C shows the tumor bearing mice that had been treated with a single dose of huMNC2-CAR44 T cells. FIG. 58D shows color scale of the images. FIG. 58E shows Kaplan-Meier survival curves of the experiment. FIG. 58F shows a table detailing the molecular makeup of the human T cells that were isolated from the mouse blood after sacrifice.

[0326] FIG. 59A-59C shows photographs NOD/SCID/GAMMA mice in an IVIS instrument measuring photon emission from tumor cells after mice were treated with nothing, PBS or huMNC2-CAR44 T cells. Mice had been injected sub-cutaneously with T47D-wt breast cancer cells or T47D+ more MUC1*, which is a mixed population of cells wherein 95% of the cells were T47D cells that had been stably transfected with even more MUC1*. Both T47D-wt and T47D plus more MUC1* cells had been made Luciferase positive. Ten (10) minutes before the IVIS photographs were taken, the mice were injected into the intraperitoneal (ip) space with the Luciferase substrate, Luciferin. FIG. 59A shows the tumor bearing mice that had only been treated with phosphate buffered saline, PBS. FIG. 59B shows the T47D-wt tumor bearing mice that had been treated with two (2) doses of huMNC2-CAR44 T cells. FIG. T90.1C shows the T47D-MUC1* tumor bearing mice that had been treated with two (2) doses of huMNC2-CAR44 T cells.

[0327] FIG. 60A-60C shows photographs NOD/SCID/GAMMA mice in an IVIS instrument measuring photon emission from tumor cells after mice were treated with nothing, PBS, untransduced T cells or huMNC2-CAR44 T cells. Mice had been injected sub-cutaneously with a mixed population of 70% T47D-wt breast cancer cells and 30% T47D cells that had been transfected with even more MUC1*. Both cell types had been made Luciferase positive. Ten (10) minutes before the IVIS photographs were taken, the mice were injected into the intraperitoneal (ip) space with the Luciferase substrate, Luciferin. FIG. 60A shows the tumor bearing mice that had only been treated with phosphate buffered saline, PBS. FIG. 60B shows tumor bearing mice that had only been treated with untransduced T cells. FIG. 60C shows the tumor bearing mice that had been treated with two (2) doses of huMNC2-CAR44 T cells.

[0328] FIGS. 61A-61J show fluorescent photographs of mice taken on an IVIS instrument. NSG (NOD/SCID/GAMMA) immune compromised mice that on Day 0 were sub-cutaneously injected into the flank with 500K human BT-20 cells which are a MUC1* positive triple negative breast cancer cell line. The cancer cells had been stably transfected with Luciferase. Tumors were allowed to engraft. On Day 6 after IVIS measurement, animals were given a one-time injection of 10 million of either human T cells transduced with huMNC2-scFv-CAR44 or untransduced T cells. 5 million T cells were injected intra-tumor and 5 million were injected into the tail vein. 10 minutes prior to IVIS photographs, mice were IP injected with Luciferin, which fluoresces after cleavage by Luciferase, thus making tumor cells fluoresce. FIGS. 61A, 61D, 61G show photographs of mice that were treated with huMNC2-scFv-CAR44 T cells that had been pre-stimulated by co-culturing for 24 hours with 4 μm beads to which was attached a synthetic MUC1*, PSMGFR peptide 24 hours prior to administration: Protocol 1. FIGS. 61B, 61E, 61H show photographs of mice that were treated with huMNC2-scFv-CAR44 T cells that had been pre-stimulated by twice co-culturing for 24 hours with MUC1* positive cancer cells 24 hours prior to administration: Protocol 2. FIGS. 61C, 61F, 61I show photographs of mice that were treated with untransduced human T cells. FIG. 61J is a color scale relating fluorescence in photons/second to color.

[0329] FIGS. 62A-62M show fluorescent photographs of mice taken on an IVIS instrument. NSG (NOD/SCID/GAMMA) immune compromised mice that on Day 0 were injected into the intraperitoneal cavity (IP) with 500K human SKOV-3 cells which are a MUC1* positive ovarian cancer cell line. The cancer cells had been stably transfected with Luciferase. Tumors were allowed to engraft. On Day 4, animals were injected into the intraperitoneal space with 10M either human T cells transduced with huMNC2-scFv-CAR44, untransduced T cells or PBS. On Day 11, animals were injected again except that half the cells were injected into the tail vein and the other half was IP injected. Animals were imaged by IVIS on Days 3, 7, 10 and 15. 10 minutes prior to IVIS photographs, mice were IP injected with Luciferin, which fluoresces after cleavage by Luciferase, thus making tumor cells fluoresce. FIGS. 62A, 62D, 62G, and 62J show photographs of mice that were treated with huMNC2-scFv-CAR44 T cells that had been pre-stimulated by co-culturing for 24 hours with 1 μm beads to which was attached a synthetic MUC1*, PSMGFR peptide 24 hours prior to administration. FIGS. 62B, 62E, 62H, and 62K show photographs of mice that were treated with untransduced human T cells. FIGS. 62C, 62F, 62I, and 62L show photographs of mice that were treated with PBS. FIGS. 62A, 62B and 62C are IVIS images taken Day 3 prior to CAR T, T cell or PBS administration. FIGS. 62D, 62E and 62F show IVIS images of animals on Day 7, just four (4) days after treatment. FIGS. 62G, 62H, and 62I show IVIS images of animals on Day 10. FIGS. 62J, 62K, and 62L show IVIS images of animals on Day 15 FIG. 62M is the IVIS color scale relating fluorescence in photons/second to color.

[0330] FIG. 63 shows a graph of an ELISA binding assay in which various monoclonal antibodies are tested for their ability to bind to the PSMGFR peptide, the N-10, C-10, N+20/C-27, or the N+9/C-9 peptide, wherein the concentration of the antibody was at 10 ug/mL or 1 ug/mL. Note that anti-MUC1* monoclonal antibodies C2 and E6, which have been demonstrated to be cancer specific, bind to the PSMGFR peptide, still bind if the 10 N-terminal amino acids are missing, but do not bind if the 10 or 9 C-terminal amino acids are missing.

[0331] FIG. 64A-64B shows a graph of an ELISA binding assay. The antibodies being tested were derived from animals immunized with the PSMGFR peptide. The first selection criteria was to confirm that the antibodies bound to the immunizing PSMGFR peptide. FIG. 64A shows a graph of an ELISA of selected antibodies that were further tested to determine their ability to bind to the PSMGFR peptide, the N-10, the C-10, N+20/C-27, or N+9/C-9 peptide. All the antibodies except 18B4 were able to bind to the N-10 peptide. 18B4 recognized N+20/C-27 but not the N-10 peptide, implying that its cognate epitope lies within the GTINVHDVET sequence. All except 20A10 and C2 showed some binding to the C-10 and N+9/C-9 peptide, showing that both 20A10 and C2 require the 10 membrane proximal amino acids for binding. C2, which requires the 10 membrane proximal amino acids for binding has been demonstrated to be cancer specific. FIG. 64B shows the sequences of the various peptides. The color of the bars for each antibody in the ELISA graph are color coded to match the deductive cognate sequence, or a portion thereof, of that antibody.

[0332] FIG. 65A-65B shows a graph of an ELISA binding assay in which various monoclonal antibodies are tested for their ability to bind to the PSMGFR peptide, the N-10, the C-10, N+20/C-27, or N+9/C-9 peptide. The antibodies being tested were derived from animals immunized with the N+20/C-27 peptide. The first selection criteria was to confirm that the antibodies bound to the immunizing N+20/C-27 peptide. FIG. 65A shows a graph of ELISA binding assay that tests the ability of each antibody to bind to various peptides. Although these antibodies were raised against the N+20/C-27 peptide, all but one, 45C11, still bind to the PSMGFR peptide. The binding of 45C11 is weak but deductive reasoning shows that the cognate epitope must lie within the SNIKFRPGSVV sequence. 1E4 was able to bind to the N+20/C-27 peptide, the PSMGFR and the N-10 peptide, consistent with the idea that its epitope must lie within the QFNQYKTE sequence. FIG. 65B shows the sequences of the various peptides. The color of the bars for each antibody in the ELISA graph are color coded to match the deductive cognate sequence, or a portion thereof, of that antibody.

[0333] FIG. 66A-66B shows a graph of an ELISA binding assay in which various monoclonal antibodies are tested for their ability to bind to the PSMGFR peptide, the N-10, the C-10, N+20/C-27, or N+9/C-9 peptide. The antibodies being tested were derived from animals immunized with the N+9/C-9 peptide. The first selection criteria was to confirm that the antibodies bound to the immunizing N+9/C-9 peptide. FIG. 66A shows a graph of the ELISA assay. All but one, 39H5, were only able to bind to the immunizing peptide, N+9/C-9. 39H5 showed very weak binding to the PSMGFR and N-10 peptide, consistent with the idea that at least a portion of its cognate epitope must lie within the QFNQYKTE sequence. FIG. 66B shows the sequences of the various peptides. The color of the bars for each antibody in the ELISA graph are color coded to match the deductive cognate sequence, or a portion thereof, of that antibody.

[0334] FIG. 67A-67D shows results of ELISA assays to further define antibody epitopes within the MUC1 or MUC1* extra cellular domain. The antibodies shown in this figure were all generated by immunizing animals with the PSMGFR peptide. Binding assays tested antibodies for their ability to bind to peptides N-19, N-26, N-30, N-10/C-5, N-19/C-5, PSMGFR, N-10 and C-10, which are all subsets of the PSMGFR peptide and numbering refers back to the PSMGFR peptide. FIG. 67A shows the binding of the various antibodies to the various peptides. FIG. 67B shows the sequence of the PSMGFR peptide that has been extended 20 amino acids at the N-terminus. FIG. 67C shows the sequences of the PSMGFR-derived subset peptides. FIG. 67D shows the sequences that comprise all or part of the epitope that is essential for antibody recognition.

[0335] FIG. 68A-68D shows results of ELISA assays to further define antibody epitopes within the MUC1 or MUC1* extra cellular domain. The antibodies shown in this figure were all generated by immunizing animals with the N+20/C-27 peptide. Binding assays tested antibodies for their ability to bind to peptides N-19, N-26, N-30, N-10/C-5, N-19/C-5, PSMGFR, N-10 and C-10, which are all subsets of the PSMGFR peptide and numbering refers back to the PSMGFR peptide. FIG. 68A shows the binding of the various antibodies to the various peptides. FIG. 68B shows the sequence of the PSMGFR peptide that has been extended 20 amino acids at the N-terminus. FIG. 68C shows the sequences of the PSMGFR-derived subset peptides. FIG. 68D shows the sequences that comprise all or part of the epitope that is essential for antibody recognition.

[0336] FIGS. 69A-69D show results of ELISA assays to further define antibody epitopes within the MUC1 or MUC1* extra cellular domain. The antibodies shown in this figure were all generated by immunizing animals with the N+9/C-9 peptide. Binding assays tested antibodies for their ability to bind to peptides N-19, N-26, N-30, N-10/C-5, N-19/C-5, PSMGFR, N-10 and C-10, which are all subsets of the PSMGFR peptide and numbering refers back to the PSMGFR peptide. FIG. 69A shows the binding of the various antibodies to the various peptides. FIG. 69B shows the sequence of the PSMGFR peptide that has been extended 20 amino acids at the N-terminus. FIG. 69C shows the sequences of the PSMGFR-derived subset peptides. FIG. 69D shows the sequences that comprise all or part of the epitope that is essential for antibody recognition.

[0337] FIG. 70A-70B shows a graph of an ELISA displacement assay. In this experiment, a multi-well plate was coated with the PSMGFR peptide. In FIG. 70A, recombinant NME7A was allowed to bind to the surface-immobilized PSMGFR peptide. Various antibodies were added, followed by a wash step. The amount of NME7A that remained attached to the PSMGFR coated plate, after antibody competition, was measured by detecting a tag on the NME7A. As a control, anti-NME7A antibodies were also tested for their ability to displace NME7A from the PSMGFR. As can be seen in the graph, antibodies MNC2, MNE6, 20A10, 3C2B1 and 5C6F3 displace NME7A from binding to the PSMGFR peptide, which is an indicator of the antibody being cancer-specific. FIG. 70B shows that the epitope within the MUC1* extracellular domain to which these antibodies bind is the sequence SVSDVPFPFSAQSGA, wherein binding is destroyed for MNC2, MNE6, 20A10, 3C2B1 if amino acids FPFS are not present or mutated and binding is destroyed for 5C6F3 if amino acids SVSDV are not present or mutated.

[0338] FIG. 71A-71H shows photographs of Western blots in which antibodies are tested for their ability to bind to a linear epitope in full-length MUC1 or MUC1*. FIG. 71A-71D shows testing of antibodies for ability to bind to a MUC1 negative cell line, HCT-116, or engineered cell lines HCT-MUC1-18, which is a cleavage resistant clone that expresses full-length MUC1, or HCT-MUC1*, which is engineered to express only the PSMGFR sequence in its extra cellular domain. FIG. 71E-71H shows testing of antibodies for ability to bind to breast cancer cell lines T47D or 1500 aka ZR-75-1. FIG. 71A and FIG. 71E show MNC2, a monoclonal antibody raised against PSMGFR peptide that binds to N-10 but not C-10 variants of the PSMGFR peptide. FIG. 71B and FIG. 71F show MNE6, a monoclonal antibody raised against PSMGFR peptide that binds to N-10 but not C-10 variants of the PSMGFR peptide. FIG. 71C and FIG. 71G show SDIX, a polyclonal antibody raised against PSMGFR peptide and which binds to the PSMGFR peptide. FIG. 71D and FIG. 71H show VU4H5, a commercially available monoclonal antibody that binds to the tandem repeats of full-length MUC1. As can be seen, neither MNC2 nor MNE6 bind linear epitopes of MUC1 species.

[0339] FIG. 72A-72P shows photographs of Western blots in which antibodies are tested for their ability to bind to a linear epitope in full-length MUC1 or MUC1*. All these antibodies were raised against the PSMGFR peptide and bind to the PSMGFR peptide. FIG. 72A-72H shows testing of antibodies for ability to bind to a MUC1 negative cell line, HCT-116, or engineered cell lines HCT-MUC1-18, which is a cleavage resistant clone that expresses full-length MUC1, or HCT-MUC1*, which is engineered to express only the PSMGFR sequence in its extra cellular domain. FIG. 72I-72P shows testing of antibodies for ability to bind to breast cancer cell lines T47D or 1500 aka ZR-75-1. FIG. 72A and FIG. 72I show 20A10. FIG. 72B and FIG. 72J show 25E6. FIG. 72C and FIG. 72K show 18B4. FIG. 72D and FIG. 72L show 18G12. FIG. 72E and FIG. 72M show 28F9. FIG. 72F and FIG. 72N show 3C2B1. FIG. 72G and FIG. 72O show 5C6F3. FIG. 72H and FIG. 72P show 5C6F3 wherein the blot has been exposed for a longer time period to render more visible the MUC1* specific bands. As can be seen, antibodies 25E6, 18B4 and to a degree 5C6F3 recognize linear epitopes but 20A10, 3C2B1, 18G12 and 28F9 do not.

[0340] FIG. 73A-73J shows photographs of Western blots in which antibodies are tested for their ability to bind to a linear epitope in full-length MUC1 or MUC1*. All these antibodies were raised against the N+20/C-27 variant of the PSMGFR peptide and bind to the N+20/C-27 peptide. FIG. 73A-73E shows testing of antibodies for ability to bind to a MUC1 negative cell line, HCT-116, or engineered cell lines HCT-MUC1-18, which is a cleavage resistant clone that expresses full-length MUC1, or HCT-MUC1*, which is engineered to express only the PSMGFR sequence in its extra cellular domain. FIG. 73F-73J shows testing of antibodies for ability to bind to breast cancer cell lines T47D or 1500 aka ZR-75-1. FIG. 73A and FIG. 73F show 1E4. FIG. 73B and FIG. 73G show 45C11. FIG. 73C and FIG. 73H show 31A1. FIG. 73D and FIG. 73I show 32C1. FIG. 73E and FIG. 73J show 29H1. As can be seen, antibodies 31A1 and 32C1 recognize linear epitopes.

[0341] FIG. 74A-74H shows photographs of Western blots in which antibodies are tested for their ability to bind to a linear epitope in full-length MUC1 or MUC1*. All these antibodies were raised against the N+9/C-9 variant of the PSMGFR peptide and bind to the N+9/C-9 peptide. FIG. 74A-74D shows testing of antibodies for ability to bind to a MUC1 negative cell line, HCT-116, or engineered cell lines HCT-MUC1-18, which is a cleavage resistant clone that expresses full-length MUC1, or HCT-MUC1*, which is engineered to express only the PSMGFR sequence in its extra cellular domain. FIG. 74E-74H shows testing of antibodies for ability to bind to breast cancer cell lines T47D or 1500 aka ZR-75-1. FIG. 74A and FIG. 74E show 8A9. FIG. 74B and FIG. 74F show 17H6. FIG. 74C and FIG. 74G show 3C5. FIG. 74D and FIG. 74H show 39H5.

[0342] FIG. 75A-75P show graphs of FACS analysis. HCT-MUC1-18 cells, which express full-length MUC1, were incubated with a catalytically active MMP9 or MMP2 for 24 hours, incubated with an antibody of the invention and then analyzed by FACS to see if the antibody bound to the MMP9 or the MMP2 cleaved form of MUC1. Note that the first bar of each graph shows that none of the antibodies binds to full-length MUC1 in the absence of cleavage. Each bar graph is labeled with both the name of the antibody used in that assay and its cognate epitope. The order of the graphs from right to left corresponds to the distance the from the cell surface of the antibody's cognate epitope. FIG. 75A shows antibody 1E4. FIG. 75B shows antibody 28F9. FIG. 75C shows antibody 18G12. FIG. 75D shows antibody 25E6. FIG. 75E shows antibody 20A10. FIG. 75F shows antibody 3C5. FIG. 75G shows antibody 29H1. FIG. 75H shows antibody 32C1. FIG. 75I shows antibody 31A1. FIG. 75J shows antibody 18B4. FIG. 75K shows antibody 45C11. FIG. 75L shows antibody 8A9. FIG. 75M shows antibody 17H6. FIG. 75N shows antibody 39H5. FIG. 75O shows antibody 3C2B1. FIG. 75P shows antibody 5C6F3.

[0343] FIG. 76A-76J show graphs of FACS analyses of reference antibodies MNC2, “C2”, and VU4H5 binding to either the MUC1-negative cell line HCT-116, HCTs transfected with MUC1*, “HCT-MUC1*”, a cleavage resistant single cell clone of HCTs transfected with MUC1 full-length, “HCT-MUC1-18”, and MNC2 binding to breast cancer cells line T47D or breast cancer cell line 1500 also known as ZR-75-1. MNC2 binds to an ectopic binding site on the extra cellular domain of MUC1*, within the membrane proximal portion of the PSMGFR sequence. The MNC2 binding site is only available after cleavage and release of the bulk of the extra cellular domain comprising the tandem repeat domain. VU4H5 binds to hundreds of repeating epitopes in the tandem repeat domain. FIG. 76A-76E show percent binding and FIG. 76F-76J show Mean Fluorescent Intensity or MFI.

[0344] FIG. 77A-77N show graphs of FACS analyses of reference antibody MNC2, “C2”, binding to a panel of cancer cell lines that are MUC1* positive, with the exception of MDA-MB-231, which expresses MUC1 and MUC1* at a level that is so low that it is often used as a negative control. MNC2 binds to an ectopic binding site on the extra cellular domain of MUC1*, within the membrane proximal portion of the PSMGFR sequence. The MNC2 binding site is only available after cleavage and release of the bulk of the extra cellular domain comprising the tandem repeat domain. FIG. 77A-77G show percent binding and FIG. 77H-77N show Mean Fluorescent Intensity or MFI. FIGS. 77A and 77H show the antibodies binding to lung cancer cell line NCI-H292. FIGS. 77B and 77I show the antibodies binding to lung cancer cell line NCI-H1975. FIGS. 77C and 77J show the antibodies binding to ovarian cancer cell line SKOV-3. FIGS. 77D and 77K show the antibodies binding to pancreatic cancer cell line HPAF-II. FIGS. 77E and 77L show the antibodies binding to pancreatic cancer cell line Capan-1. FIGS. 77F and 77M show the antibodies binding to prostate cancer cell line DU145. FIGS. 77G and 77N show the antibodies binding to breast cancer cell line MDA-MB-231, which is nearly MUC1 and MUC1* negative.

[0345] FIG. 78A-78C shows a color coded schematic of the basic PSMGFR sequence that has been extended or deleted at both the N- and C-termini. Antibodies of the invention were tested against this subset of peptides to further refine the epitopes to which each antibody binds or the critical amino acids within the epitope to which each antibody binds. FIG. 78A is an aligned schematic of the various subsets of peptides. FIG. 78B lists the antibodies that bind to each of the color coded sequences. FIG. 78C lists the cancer cell lines that each antibody recognizes.

[0346] FIG. 79A-79I shows color coded graphs that resulted from FACS analyses of each antibody binding to T47D breast cancer cells and their respective cognate sequences within the N-terminally extended PSMGFR sequence. FIG. 79A-79D are FACS graphs showing the percent cells that were recognized by each antibody. FIG. 79E-79H are FACS graphs showing the Mean Fluorescence Intensity, MFI, of each antibody. FIG. 79A and FIG. 79E show the FACS graph of antibodies that were generated by immunizing with the PSMGFR peptide. FIG. 79B and FIG. 79F show the FACS graph of antibodies that were generated by immunizing with the N+20/C-27 peptide. FIG. 79C and FIG. 79G show the FACS graph of antibodies that were generated by immunizing with the N+9/C-9 peptide. FIG. 79D and FIG. 79H also show the FACS graph of antibodies that were generated by immunizing with the PSMGFR peptide. FIG. 79I shows the PSMGFR sequence that is extended at the N-terminus by 20 amino acids. FIG. 79A, FIG. 79E show that 20A10 recognizes MUC1* as it exists on T47D breast cancer cells. FIG. 79D, FIG. 79H show that 3C2B1 recognizes MUC1* as it exists on T47D breast cancer cells. FIG. 79D, FIG. 79H show that 5C6F3 recognizes MUC1* as it exists on T47D breast cancer cells.

[0347] FIG. 80A-80I shows color coded graphs that resulted from FACS analyses of each antibody binding to 1500, also known as ZR-75-1, breast cancer cells and their respective cognate sequences within the N-terminally extended PSMGFR sequence. FIG. 80A-80C are FACS graphs showing the percent cells that were recognized by each antibody. FIG. 80D-80F are FACS graphs showing the Mean Fluorescence Intensity, MFI, of each antibody. FIG. 80A, FIG. 80E FIG. 80D and FIG. 80H show the FACS graph of antibodies that were generated by immunizing with the PSMGFR peptide. FIG. 80B and FIG. 80F show the FACS graph of antibodies that were generated by immunizing with the N+20/C-27 peptide. FIG. 80C and FIG. 80G show the FACS graph of antibodies that were generated by immunizing with the N+9/C-9 peptide. FIG. 80I shows the PSMGFR sequence that is extended at the N-terminus by 20 amino acids. FIG. 80A, FIG. 80E show that antibody 20A10 recognizes MUC1* as it exists on 1500 aka ZR-75-1 breast cancer cells. FIG. 80D, FIG. 80H show that antibody 3C2B1 recognizes MUC1* as it exists on 1500 aka ZR-75-1 breast cancer cells. FIG. 80D, FIG. 80H show that antibody 5C6F3 recognizes MUC1* as it exists on 1500 aka ZR-75-1 breast cancer cells.

[0348] FIG. 81A-81G shows color coded graphs that resulted from FACS analyses of each antibody binding to NCI-H292 lung cancer cells and their respective cognate sequences within the N-terminally extended PSMGFR sequence. FIG. 81A-81C are FACS graphs showing the percent cells that were recognized by each antibody. FIG. 81D-81F are FACS graphs showing the Mean Fluorescence Intensity, MFI, of each antibody. FIG. 81A and FIG. 81D show the FACS graph of antibodies that were generated by immunizing with the PSMGFR peptide. FIG. 81B and FIG. 81E show the FACS graph of antibodies that were generated by immunizing with the N+20/C-27 peptide. FIG. 81C and FIG. 81F show the FACS graph of antibodies that were generated by immunizing with the N+9/C-9 peptide. FIG. 81G shows the PSMGFR sequence that is extended at the N-terminus by 20 amino acids. FIG. 81A, FIG. 81D show that antibody 20A10 recognizes MUC1* as it exists on H292 lung cancer cells.

[0349] FIG. 82A-82G shows color coded graphs that resulted from FACS analyses of each antibody binding to NCI-H1975 lung cancer cells and their respective cognate sequences within the N-terminally extended PSMGFR sequence. FIG. 82A-82C are FACS graphs showing the percent cells that were recognized by each antibody. FIG. 82D-82F are FACS graphs showing the Mean Fluorescence Intensity, MFI, of each antibody. FIG. 82A and FIG. 82D show the FACS graph of antibodies that were generated by immunizing with the PSMGFR peptide. FIG. 82B and FIG. 82E show the FACS graph of antibodies that were generated by immunizing with the N+20/C-27 peptide. FIG. 82C and FIG. 82F show the FACS graph of antibodies that were generated by immunizing with the N+9/C-9 peptide. FIG. 82G shows the PSMGFR sequence that is extended at the N-terminus by 20 amino acids. FIG. 82A, FIG. 82D show that antibody 20A10 recognizes MUC1* as it exists on H1975 lung cancer cells.

[0350] FIG. 83A-83G shows color coded graphs that resulted from FACS analyses of each antibody binding to SKOV-3 ovarian cancer cells and their respective cognate sequences within the N-terminally extended PSMGFR sequence. FIG. 83A-83C are FACS graphs showing the percent cells that were recognized by each antibody. FIG. 83D-83F are FACS graphs showing the Mean Fluorescence Intensity, MFI, of each antibody. FIG. 83A and FIG. 83D show the FACS graph of antibodies that were generated by immunizing with the PSMGFR peptide. FIG. 83B and FIG. 83E show the FACS graph of antibodies that were generated by immunizing with the N+20/C-27 peptide. FIG. 83C and FIG. 83F show the FACS graph of antibodies that were generated by immunizing with the N+9/C-9 peptide. FIG. 83G shows the PSMGFR sequence that is extended at the N-terminus by 20 amino acids. FIG. 83A, FIG. 83D shows that antibody 20A10 recognizes MUC1* as it exists on SKOV-3 ovarian cancer cells.

[0351] FIG. 84A-84G shows color coded graphs that resulted from FACS analyses of each antibody binding to DU145 prostate cancer cells and their respective cognate sequences within the N-terminally extended PSMGFR sequence. FIG. 84A-84C are FACS graphs showing the percent cells that were recognized by each antibody. FIG. 84D-84F are FACS graphs showing the Mean Fluorescence Intensity, MFI, of each antibody. FIG. 84A and FIG. 84D show the FACS graph of antibodies that were generated by immunizing with the PSMGFR peptide. FIG. 84B and FIG. 84E show the FACS graph of antibodies that were generated by immunizing with the N+20/C-27 peptide. FIG. 84C and FIG. 84F show the FACS graph of antibodies that were generated by immunizing with the N+9/C-9 peptide. FIG. 84G shows the PSMGFR sequence that is extended at the N-terminus by 20 amino acids. FIG. 84A, FIG. 84E show that antibody 20A10 recognizes MUC1* as it exists on DU145 prostate cancer cells. FIG. 84D, FIG. 84H show that antibody 3C2B1 recognizes MUC1* as it exists on DU145 prostate cancer cells. FIG. 84D, FIG. 84H shows that antibody 5C6F3 recognizes MUC1* as it exists on DU145 prostate cancer cells.

[0352] FIG. 85A-85G shows color coded graphs that resulted from FACS analyses of each antibody binding to HPAF-II pancreatic cancer cells and their respective cognate sequences within the N-terminally extended PSMGFR sequence. FIG. 85A-85C are FACS graphs showing the percent cells that were recognized by each antibody. FIG. 85D-85F are FACS graphs showing the Mean Fluorescence Intensity, MFI, of each antibody. FIG. 85A and FIG. 85D show the FACS graph of antibodies that were generated by immunizing with the PSMGFR peptide. FIG. 85B and FIG. 85E show the FACS graph of antibodies that were generated by immunizing with the N+20/C-27 peptide. FIG. 85C and FIG. 85F show the FACS graph of antibodies that were generated by immunizing with the N+9/C-9 peptide. FIG. 85G shows the PSMGFR sequence that is extended at the N-terminus by 20 amino acids. FIG. 85A, FIG. 85D show that antibody 20A10 recognizes MUC1* as it exists on HPAF II pancreatic cancer cells.

[0353] FIG. 86A-86G shows color coded graphs that resulted from FACS analyses of each antibody binding to Capan-1 pancreatic cancer cells and their respective cognate sequences within the N-terminally extended PSMGFR sequence. FIG. 86A-86C are FACS graphs showing the percent cells that were recognized by each antibody. FIG. 86D-86F are FACS graphs showing the Mean Fluorescence Intensity, MFI, of each antibody. FIG. 86A and FIG. 86D show the FACS graph of antibodies that were generated by immunizing with the PSMGFR peptide. FIG. 86B and FIG. 86E show the FACS graph of antibodies that were generated by immunizing with the N+20/C-27 peptide. FIG. 86C and FIG. 86F show the FACS graph of antibodies that were generated by immunizing with the N+9/C-9 peptide. FIG. 86G shows the PSMGFR sequence that is extended at the N-terminus by 20 amino acids.

[0354] FIG. 87A-87G shows color coded graphs that resulted from FACS analyses of each antibody binding to MDA-MB-231 breast cancer cells, which are nearly MUC1 negative, and their respective cognate sequences within the N-terminally extended PSMGFR sequence. FIG. 87A-87C are FACS graphs showing the percent cells that were recognized by each antibody. FIG. 87D-87F are FACS graphs showing the Mean Fluorescence Intensity, MFI, of each antibody. FIG. 87A and FIG. 87D show the FACS graph of antibodies that were generated by immunizing with the PSMGFR peptide. FIG. 87B and FIG. 87E show the FACS graph of antibodies that were generated by immunizing with the N+20/C-27 peptide. FIG. 87C and FIG. 87F show the FACS graph of antibodies that were generated by immunizing with the N+9/C-9 peptide. FIG. 87G shows the PSMGFR sequence that is extended at the N-terminus by 20 amino acids.

[0355] FIG. 88A-88L show photographs of normal liver tissue specimens, each from the same donor but stained with a different antibody of the invention. FIG. 88A-88F show the entire tissue core. FIG. 88G-88L show the 40× magnification of a particular area of the tissue. The tissues are ordered from right to left with antibodies that bind to the most membrane proximal, that is to say most C-terminal portion of the PSMGFR peptide, on the right and antibodies that bind to the most N-terminal portions of the MUC1 extra cellular domain, even beyond the PSMGFR region, on the left. As can be seen in the figure, the most cancer-specific antibodies are those that bind to the more membrane proximal portions of the PSMGFR sequence and antibodies that bind to the most distal, N-terminal portions lose cancer specificity, with those antibodies that bind to epitopes outside of the PSMGFR having lost all cancer specificity. As can be seen, FIGS. 88F and 88L show that antibody 3C2B1, which binds the portion of MUC1* extracellular domain that comprises all or part of the sequence FPFS or PFPFSAQSGA, does not bind to normal liver.

[0356] FIG. 89A-89H show photographs of normal heart tissue specimens, stained with different antibodies of the invention. FIG. 89A-89D show the entire tissue core. FIG. 89E-89HL show the 40× magnification of a particular area of the tissue. FIG. 89A and FIG. 89E show staining with MNC2-scFv. FIG. 89B and FIG. 89F show staining with MNE6. FIG. 89C and FIG. 89G show staining with 20A10. FIG. 89D and FIG. 89H show staining with 3C2B1. These antibodies bind to an epitope that comprises all or part of the sequence FPFS or PFPFSAQSGA. All these antibodies are all able to bind to the PSMGFR peptide, bind to the N-10 peptide but do not bind to the C-10 peptide. In addition, these antibodies disrupt the binding of NME7_{AB} to the MUC1* extra cellular domain as exemplified by the PSMGFR peptide. Further, these antibodies recognize a MUC1 cleavage product when the cleavage enzyme is MMP9. As can be seen in the figure, these antibodies show no binding to normal heart tissue. FIG. 89A, FIG. 89E show that reference antibody MNC2 does not bind to normal heart tissue. FIG. 89B, FIG. 89F show that reference antibody MNE6 does not bind to normal heart tissue. FIG. 89C, FIG. 89G show that antibody 20A10 does not bind to normal heart tissue. FIG. 89D, FIG. 89H shows that antibody 3C2B1 does not bind to normal heart tissue.

[0357] FIG. 90A-90D show photographs of normal heart tissue specimens, stained with different antibodies of the invention. FIG. 90A-90B show the entire tissue core. FIG. 90C-90D show the 40× magnification of a particular area of the tissue. FIG. 90A and FIG. 90C show staining with MNC3. FIG. 90B and FIG. 90D show staining with 25E6. These antibodies bind to an epitope that comprises all or part of the sequence ASRYNLT. These antibodies are all able to bind to the PSMGFR peptide, bind to the N-10 peptide but also bind to the C-10 peptide. As can be seen, these antibodies are not as cancer-specific and show some binding to normal heart tissue.

[0358] FIG. 91A-91B show photographs of normal heart tissue specimens, stained with an antibody of the invention 1E4. FIG. 91A show the entire tissue core. FIG. 91B show the 40× magnification of a particular area of the tissue. Antibody 1E4 binds to an epitope that comprises all or part of the sequence QFNQYKTEA. Antibody 1E4 can bind to the N-10 peptide but also binds to the C-10 peptide. As can be seen in the figure, 1E4 binds to normal heart tissue. As can be seen, these antibodies are not as cancer-specific and show some binding to normal heart tissue.

[0359] FIG. 92A-92H show photographs of normal heart tissue specimens, stained with different antibodies of the invention. FIG. 92A-92D show the entire tissue core. FIG. 92E-92HL show the 40× magnification of a particular area of the tissue. FIG. 92A and FIG. 92E show staining with 18B4. FIG. 92B and FIG. 92F show staining with 31A1. FIG. 92C and FIG. 92G show staining with 32C1. FIG. 92D and FIG. 92H show staining with 29H1. These antibodies bind to an epitope that comprises all or part of the sequence GTINVHDVET, which is the most N-terminal part of the PSMGFR peptide. None of these antibodies are able to bind to the N-10 peptide. As can be seen in the figure, all of these antibodies except 18B4 show binding to normal heart tissue.

[0360] FIG. 93A-93D show photographs of normal heart tissue specimens, stained with antibodies of the invention. FIG. 93A-93B show the entire tissue core. FIG. 93C-93D show the 40× magnification of a particular area of the tissue. FIG. 93A and FIG. 93C show staining with antibody 8A9. FIG. 93B and FIG. 93D show staining with antibody 17H6. Both antibodies bind to an epitope that that is outside of the PSMGFR region and comprises all or part of the sequence VQLTLAFRE. As can be seen in the figure, both antibodies show strong binding to normal heart tissue.

[0361] FIG. 94A-94B show photographs of normal heart tissue specimens, stained with an antibody of the invention 45C11. FIG. 94A show the entire tissue core. FIG. 94B show the 40× magnification of a particular area of the tissue. Antibody 45C11 binds to an epitope that is outside of the PSMGFR region and comprises all or part of the sequence SNIKFRPGSVV. Antibody 45C11 cannot bind to the N-10 peptide. As can be seen in the figure, 45C11 binds strongly to normal heart tissue.

[0362] FIG. 95A-95H show photographs of normal liver tissue specimens, stained with different antibodies of the invention. FIG. 95A-95D show the entire tissue core. FIG. 95E-95HL show the 40× magnification of a particular area of the tissue. FIG. 95A and FIG. 95E show staining with reference antibody MNC2-scFv. FIG. 95B and FIG. 95F show staining with reference antibody MNE6. FIG. 95C and FIG. 95G show staining with 20A10. FIG. 95D and FIG. 95H show staining with 3C2B1. These antibodies bind to an epitope that comprises all or part of the sequence FPFS or PFPFSAQSGA. All these antibodies are all able to bind to the PSMGFR peptide, bind to the N-10 peptide but do not bind to the C-10 peptide. In addition, these antibodies disrupt the binding of NME7_{AB} to the MUC1* extra cellular domain as exemplified by the PSMGFR peptide. Further, these antibodies recognize a MUC1 cleavage product when the cleavage enzyme is MMP9. As can be seen in the figure, these antibodies show no binding to normal liver tissue.

[0363] FIG. 96A-96D show photographs of normal liver tissue specimens, stained with different antibodies of the invention. FIG. 96A-96B show the entire tissue core. FIG. 96C-96D show the 40× magnification of a particular area of the tissue. FIG. 96A and FIG. 96C show staining with MNC3. FIG. 96B and FIG. 96D show staining with 25E6. These antibodies bind to an epitope that comprises all or part of the sequence ASRYNLT. These antibodies are all able to bind to the PSMGFR peptide, bind to the N-10 peptide but also bind to the C-10 peptide. As can be seen, these antibodies are not as cancer-specific and show some binding to normal liver tissue.

[0364] FIG. 97A-97B show photographs of normal liver tissue specimens, stained with an antibody of the invention 1E4. FIG. 97A show the entire tissue core. FIG. 97B show the 40× magnification of a particular area of the tissue. Antibody 1E4 binds to an epitope that comprises all or part of the sequence QFNQYKTEA. Antibody 1E4 can bind to the N-10 peptide but also binds to the C-10 peptide. As can be seen in the figure, 1E4 binds to normal liver tissue.

[0365] FIG. 98A-98H show photographs of normal liver tissue specimens, stained with different antibodies of the invention. FIG. 98A-98D show the entire tissue core. FIG. 98E-98H show the 40× magnification of a particular area of the tissue. FIG. 98A and FIG. 98E show staining with 18B4. FIG. 98B and FIG. 98F show staining with 31A1. FIG. 98C and FIG. 98G show staining with 32C1. FIG. 98D and FIG. 98H show staining with 29H1. These antibodies bind to an epitope that comprises all or part of the sequence GTINVHDVET, which is the most N-terminal part of the PSMGFR peptide. None of these antibodies are able to bind to the N-10 peptide. As can be seen in the figure, 32C1 shows some binding to normal liver and 29H1 shows extremely strong binding to normal liver tissue.

[0366] FIG. 99A-99D show photographs of normal liver tissue specimens, stained with antibodies of the invention. FIG. 99A-99B show the entire tissue core. FIG. 99C-99D show the 40× magnification of a particular area of the tissue. FIG. 99A and FIG. 99C show staining with antibody 8A9. FIG. 99B and FIG. 99D show staining with antibody 17H6. Both antibodies bind to an epitope that that is outside of the PSMGFR region and comprises all or part of the sequence VQLTLAFRE. As can be seen in the figure, 8A9 shows strong binding to normal liver tissue. 17H6 is a weak antibody and it is possible that it was not used at a high enough concentration in this study.

[0367] FIG. 100A-100B show photographs of normal liver tissue specimens, stained with an antibody of the invention 45C11. FIG. 100A show the entire tissue core. FIG. 100B show the 40× magnification of a particular area of the tissue. Antibody 45C11 binds to an epitope that is outside of the PSMGFR region and comprises all or part of the sequence SNIKFRPGSVV. Antibody 45C11 cannot bind to the N-10 peptide. As can be seen in the figure, 45C11 binds strongly to normal liver tissue.

[0368] FIG. 101A-101H show photographs of normal lung tissue specimens, stained with different antibodies of the invention. FIG. 101A-11D show the entire tissue core. FIG. 101E-101H show the 40× magnification of a particular area of the tissue. FIG. 101A and FIG. 101E show staining with MNC2-scFv. FIG. 101B and FIG. 101F show staining with MNE6. FIG. 101C and FIG. 101G show staining with 20A10. FIG. 101D and FIG. 101H show staining with 3C2B1. These antibodies bind to an epitope that comprises all or part of the sequence FPFS or PFPFSAQSGA. All these antibodies are all able to bind to the PSMGFR peptide, bind to the N-10 peptide but do not bind to the C-10 peptide. In addition, these antibodies disrupt the binding of NME7_{AB} to the MUC1* extra cellular domain as exemplified by the PSMGFR peptide. Further, these antibodies recognize a MUC1 cleavage product when the cleavage enzyme is MMP9. As can be seen in the figure, these antibodies show no binding to normal lung tissue.

[0369] FIG. 102A-102D show photographs of normal lung tissue specimens, stained with different antibodies of the invention. FIG. 102A-102B show the entire tissue core. FIG. 102C-102D show the 40× magnification of a particular area of the tissue. FIG. 102A and FIG. 102C show staining with MNC3. FIG. 102B and FIG. 102D show staining with 25E6. These antibodies bind to an epitope that comprises all or part of the sequence ASRYNLT. These antibodies are all able to bind to the PSMGFR peptide, bind to the N-10 peptide but also bind to the C-10 peptide. As can be seen, these antibodies are not as cancer-specific and show some binding to normal lung tissue.

[0370] FIG. 103A-103B show photographs of normal lung tissue specimens, stained with an antibody of the invention 1E4. FIG. 103A show the entire tissue core. FIG. 103B show the 40× magnification of a particular area of the tissue. Antibody 1E4 binds to an epitope that comprises all or part of the sequence QFNQYKTEA. Antibody 1E4 can bind to the N-10 peptide but also binds to the C-10 peptide.

[0371] FIG. 104A-104H show photographs of normal lung tissue specimens, stained with different antibodies of the invention. FIG. 104A-104D show the entire tissue core. FIG. 104E-104H show the 40× magnification of a particular area of the tissue. FIG. 104A and FIG. 104E show staining with 18B4. FIG. 104B and FIG. 104F show staining with 31A1. FIG. 104C and FIG. 104G show staining with 32C1. FIG. 104D and FIG. 104H show staining with 29H1. These antibodies bind to an epitope that comprises all or part of the sequence GTINVHDVET, which is the most N-terminal part of the PSMGFR peptide. None of these antibodies are able to bind to the N-10 peptide. As can be seen in the figure, all these antibodies show strong binding to normal lung tissue.

[0372] FIG. 105A-105D show photographs of normal lung tissue specimens, stained with antibodies of the invention. FIG. 105A-105B show the entire tissue core. FIG. 105C-105D show the 40× magnification of a particular area of the tissue. FIG. 105A and FIG. 105C show staining with antibody 8A9. FIG. 105B and FIG. 105D show staining with antibody 17H6. Both antibodies bind to an epitope that that is outside of the PSMGFR region and comprises all or part of the sequence VQLTLAFRE. As can be seen in the figure, 8A9 shows strong binding to normal lung tissue. 17H6 is a weak antibody and it is possible that it was not used at a high enough concentration in this study.

[0373] FIG. 106A-106B show photographs of normal lung tissue specimens, stained with an antibody of the invention 45C11. FIG. 106A show the entire tissue core. FIG. 106B show the 40× magnification of a particular area of the tissue. Antibody 45C11 binds to an epitope that is outside of the PSMGFR region and comprises all or part of the sequence SNIKFRPGSVV. Antibody 45C11 cannot bind to the N-10 peptide. As can be seen in the figure, 45C11 binds to normal lung tissue.

[0374] FIG. 107A-107H show photographs of normal bone marrow tissue specimens, stained with different antibodies of the invention. FIG. 107A-107D show the entire tissue core. FIG. 107E-107H show the 40× magnification of a particular area of the tissue. FIG. 107A and FIG. 107E show staining with MNC2-scFv. FIG. 107B and FIG. 107F show staining with MNE6. FIG. 107C and FIG. 107G show staining with 20A10. FIG. 107D and FIG. 107H show staining with 3C2B1. These antibodies bind to an epitope that comprises all or part of the sequence FPFS or PFPFSAQSGA. All these antibodies are all able to bind to the PSMGFR peptide, bind to the N-10 peptide but do not bind to the C-10 peptide. In addition, these antibodies disrupt the binding of NME7_{AB} to the MUC1* extra cellular domain as exemplified by the PSMGFR peptide. Further, these antibodies recognize a MUC1 cleavage product when the cleavage enzyme is MMP9. As can be seen in the figure, these antibodies show no binding to normal bone marrow tissue.

[0375] FIG. 108A-108D show photographs of normal bone marrow tissue specimens, stained with different antibodies of the invention. FIG. 108A-108B show the entire tissue core. FIG. 108C-108D show the 40× magnification of a particular area of the tissue. FIG. 108A and FIG. 108C show staining with MNC3. FIG. 108B and FIG. 108D show staining with 25E6. These antibodies bind to an epitope that comprises all or part of the sequence ASRYNLT. These antibodies are all able to bind to the PSMGFR peptide, bind to the N-10 peptide but also bind to the C-10 peptide.

[0376] FIG. 109A-109B show photographs of normal bone marrow tissue specimens, stained with an antibody of the invention 1E4. FIG. 109A show the entire tissue core. FIG. 109B show the 40× magnification of a particular area of the tissue. Antibody 1E4 binds to an epitope that comprises all or part of the sequence QFNQYKTEA. Antibody 1E4 can bind to the N-10 peptide but also binds to the C-10 peptide. 1E4 binds to normal bone marrow.

[0377] FIG. 110A-110H show photographs of normal bone marrow tissue specimens, stained with different antibodies of the invention. FIG. 110A-110D show the entire tissue core. FIG. 110E-110H show the 40× magnification of a particular area of the tissue. FIG. 110A and FIG. 110E show staining with 18B4. FIG. 110B and FIG. 110F show staining with 31A1. FIG. 110C and FIG. 110G show staining with 32C1. FIG. 110D and FIG. 110H show staining with 29H1. These antibodies bind to an epitope that comprises all or part of the sequence GTINVHDVET, which is the most N-terminal part of the PSMGFR peptide. None of these antibodies are able to bind to the N-10 peptide. As can be seen in the figure, all these antibodies show strong binding to normal bone marrow tissue.

[0378] FIG. 111A-111D show photographs of normal bone marrow tissue specimens, stained with antibodies of the invention. FIG. 111A-111B show the entire tissue core. FIG. 111C-111D show the 40× magnification of a particular area of the tissue. FIG. 111A and FIG. 111C show staining with antibody 8A9. FIG. 111B and FIG. 111D show staining with antibody 17H6. Both antibodies bind to an epitope that that is outside of the PSMGFR region and comprises all or part of the sequence VQLTLAFRE. As can be seen in the figure, 8A9 shows strong binding to normal bone marrow tissue. 17H6 is a weak antibody and it is possible that it was not used at a high enough concentration in this study.

[0379] FIG. 112A-112B show photographs of normal bone marrow tissue specimens, stained with an antibody of the invention 45C11. FIG. 112A show the entire tissue core. FIG. 112B show the 40× magnification of a particular area of the tissue. Antibody 45C11 binds to an epitope that is outside of the PSMGFR region and comprises all or part of the sequence SNIKFRPGSVV. Antibody 45C11 cannot bind to the N-10 peptide. As can be seen in the figure, 45C11 binds to normal bone marrow tissue.

[0380] FIG. 113A-113C shows photographs, array map and description of FDA normal tissue array MNO1021 stained with the anti-PSMGFR antibody 20A10 at 0.25 ug/mL. FIG. 113A shows photographs of the tissue micro array. FIG. 113B shows map of the array with abbreviated tissue descriptors. FIG. 113C detailed description of the tissue micro array with non-identifying donor data.

[0381] FIG. 114A-114X shows photographs of specific tissues from FDA normal tissue array MNO1021 stained with the anti-PSMGFR antibody 20A10 at 0.25 ug/mL, magnified to 6× and 20×. FIG. 114A and FIG. 114E are adrenal gland. FIG. 114B and FIG. 114F are breast. FIG. 114C and FIG. 114G are fallopian tube. FIG. 114D and FIG. 114H are kidney. FIG. 114I and FIG. 114M are heart muscle. FIG. 114J and FIG. 114N are liver. FIG. 114K and FIG. 114O are lung. FIG. 114L and FIG. 114P are ureter. FIG. 114Q and FIG. 114U are eye. FIG. 114R and FIG. 114V are cerebral cortex. FIG. 114S and FIG. 114W are bone marrow. FIG. 114T and FIG. 114X are skeletal muscle.

[0382] FIG. 115A-115C shows photographs, array map and description of breast cancer tissue array BR1141 stained with the anti-PSMGFR antibody 20A10 at 0.25 ug/mL. FIG. 115A shows photographs of the tissue micro array. FIG. 115B shows map of the array with abbreviated tissue descriptors. FIG. 115C detailed description of the tissue micro array with non-identifying donor data.

[0383] FIG. 116A-116F shows photographs of specific tissues from breast cancer tissue array BR1141 stained with the anti-PSMGFR antibody 20A10 at 0.25 ug/mL, magnified to 6× and 20×. FIG. 116A and FIG. 116D are photographs of a Grade 2 invasive ductal carcinoma. FIG. 116B and FIG. 116E are photographs of a Grade 2 invasive ductal carcinoma. FIG. 116C and FIG. 116F are photographs of a Grade 2 invasive ductal carcinoma.

[0384] FIG. 117A-117C shows photographs, array map and description of pancreatic cancer tissue array PA805c stained with the anti-PSMGFR antibody 20A10 at 0.25 ug/mL. FIG. 117A shows photographs of the tissue micro array. FIG. 117B shows map of the array with abbreviated tissue descriptors. FIG. 117C detailed description of the tissue micro array with non-identifying donor data.

[0385] FIG. 118A-118F shows photographs of specific tissues from pancreatic cancer tissue array PA805c stained with the anti-PSMGFR antibody 20A10 at 0.25 ug/mL, magnified to 6× and 20×. FIG. 118A and FIG. 118D are photographs of a Grade 2 papillary adenocarcinoma. FIG. 118B and FIG. 118E are photographs of a Grade 2-3 ductal carcinoma.

[0386] FIG. 118C and FIG. 118F are photographs of a Grade 3 invasive adenocarcinoma.

[0387] FIG. 119A-119C shows photographs, array map and description of esophageal cancer tissue array BC001113 stained with the anti-PSMGFR antibody 20A10 at 0.25 ug/mL. FIG. 119A shows photographs of the tissue micro array. FIG. 119B shows map of the array with abbreviated tissue descriptors. FIG. 119C detailed description of the tissue micro array with non-identifying donor data.

[0388] FIG. 120A-120F shows photographs of specific tissues from esophageal cancer tissue array BC001113 stained with the anti-PSMGFR antibody 20A10 at 0.25 ug/mL, magnified to 6× and 20×. FIG. 120A and FIG. 120D are photographs of the specimen at position A1. FIG. 120B and FIG. 120E are photographs of the specimen at position A7. FIG. 120C and FIG. 120F are photographs of the specimen at position A8.

[0389] FIG. 121A-121C shows photographs, array map and description of FDA normal tissue array MNO1021 stained with the anti-PSMGFR antibody 3C2B1 at 20 ug/mL. FIG. 121A shows photographs of the tissue micro array. FIG. 121B shows map of the array with abbreviated tissue descriptors. FIG. 121C detailed description of the tissue micro array with non-identifying donor data.

[0390] FIG. 122A-122X shows photographs of specific tissues from FDA normal tissue array MNO1021 stained with the anti-PSMGFR antibody 3C2B1 at 20 ug/mL, magnified to 6× and 20×. FIG. 122A and FIG. 122E are adrenal gland. FIG. 122B and FIG. 122F are breast. FIG. 122C and FIG. 122G are fallopian tube. FIG. 122D and FIG. 122H are kidney. FIG. 122I and FIG. 122M are heart muscle. FIG. 122J and FIG. 122N are liver. FIG. 122K and FIG. 122O are lung. FIG. 122L and FIG. 122P are ureter. FIG. 122Q and FIG. 122U are eye. FIG. 122R and FIG. 122V are cerebral cortex. FIG. 122S and FIG. 122W are bone marrow. FIG. 122T and FIG. 122X are skeletal muscle.

[0391] FIG. 123A-123C shows photographs, array map and description of pancreatic cancer tissue array PA1003 stained with the anti-PSMGFR antibody 3C2B1 at 20 ug/mL. FIG. 123A shows photographs of the tissue micro array. FIG. 123B shows map of the array with abbreviated tissue descriptors. FIG. 123C detailed description of the tissue micro array with non-identifying donor data.

[0392] FIG. 124A-124F shows photographs of specific tissues from pancreatic cancer tissue array PA1003 stained with the anti-PSMGFR antibody 3C2B1 at 20 ug/mL, magnified to 6× and 20×. FIG. 124A and FIG. 124D are photographs of a Grade 2 adenocarcinoma. FIG. 124B and FIG. 124E are photographs of a Grade 2 adenocarcinoma. FIG. 124C and FIG. 124F are photographs of a Grade 2 adenocarcinoma.

[0393] FIG. 125A-125C shows photographs, array map and description of breast cancer tissue array BR1141 stained with the anti-PSMGFR antibody 3C2B1 at 20 ug/mL. FIG. 125A shows photographs of the tissue micro array. FIG. 125B shows map of the array with abbreviated tissue descriptors. FIG. 125C detailed description of the tissue micro array with non-identifying donor data.

[0394] FIG. 126A-126F shows photographs of specific tissues from breast cancer tissue array BR1141 stained with the anti-PSMGFR antibody 3C2B1 at 20 ug/mL, magnified to 6× and 20×. FIG. 126A and FIG. 126D are photographs of a Grade 2 invasive ductal carcinoma. FIG. 126B and FIG. 126E are photographs of a Grade 2 invasive ductal carcinoma. FIG. 126C and FIG. 126F are photographs of a Grade 2 invasive carcinoma.

[0395] FIG. 127A-127C shows photographs, array map and description of FDA normal tissue array MNO1021 stained with the anti-PSMGFR antibody 5C6F3 at 1 ug/mL. FIG. 127A shows photographs of the tissue micro array. FIG. 127B shows map of the array with abbreviated tissue descriptors. FIG. 127C detailed description of the tissue micro array with non-identifying donor data.

[0396] FIG. 128A-128X shows photographs of specific tissues from FDA normal tissue array MNO1021 stained with the anti-PSMGFR antibody 5C6F3 at 1 ug/mL, magnified to 6× and 20×. FIG. 128A and FIG. 128E are adrenal gland. FIG. 128B and FIG. 128F are breast. FIG. 128C and FIG. 128G are fallopian tube. FIG. 128D and FIG. 128H are kidney. FIG. 128I and FIG. 128M are heart muscle. FIG. 128J and FIG. 128N are liver. FIG. 128K and FIG. 128O are lung. FIG. 128L and FIG. 128P are ureter. FIG. 128Q and FIG. 128U are eye. FIG. 128R and FIG. 128V are cerebral cortex. FIG. 128S and FIG. 128W are bone marrow. FIG. 128T and FIG. 128X are skeletal muscle.

[0397] FIG. 129A-129C shows photographs, array map and description of pancreatic cancer tissue array PA1003 stained with the anti-PSMGFR antibody 5C6F3 at 1-20 ug/mL. FIG. 129A shows photographs of the tissue micro array. FIG. 129B shows map of the array with abbreviated tissue descriptors. FIG. 129C detailed description of the tissue micro array with non-identifying donor data.

[0398] FIG. 130A-130F shows photographs of specific tissues from pancreatic cancer tissue array PA1003 stained with the anti-PSMGFR antibody 5C6F3 at 1 ug/mL, magnified to 6× and 20×. FIG. 130A and FIG. 130D are photographs of a Grade 2 adenocarcinoma. FIG. 130B and FIG. 130E are photographs of a Grade 2 adenocarcinoma. FIG. 130C and FIG. 130F are photographs of a Grade 2 adenocarcinoma.

[0399] FIG. 131A-131C shows photographs, array map and description of breast cancer tissue array BR1141 stained with the anti-PSMGFR antibody 5C6F3 at 1 ug/mL. FIG. 131A shows photographs of the tissue micro array. FIG. 131B shows map of the array with abbreviated tissue descriptors. FIG. 131C detailed description of the tissue micro array with non-identifying donor data.

[0400] FIG. 132A-132F shows photographs of specific tissues from breast cancer tissue array BR1141 stained with the anti-PSMGFR antibody 5C6F3 at 1 ug/mL, magnified to 6× and 20×. FIG. 132A and FIG. 132D are photographs of a Grade 2 invasive ductal carcinoma. FIG. 132B and FIG. 132E are photographs of a Grade 2 invasive ductal carcinoma. FIG. 132C and FIG. 132F are photographs of a Grade 2 invasive carcinoma.

[0401] FIG. 133A-133C shows photographs, array map and description of FDA normal tissue array MNO1021 stained with the anti-PSMGFR antibody 18B4 at 10 ug/mL. FIG. 133A shows photographs of the tissue micro array. FIG. 133B shows map of the array with abbreviated tissue descriptors. FIG. 133C detailed description of the tissue micro array with non-identifying donor data.

[0402] FIG. 134A-134X shows photographs of specific tissues from FDA normal tissue array MNO1021 stained with the anti-PSMGFR antibody 18B4 at 10 ug/mL, magnified to 6× and 20×. FIG. 134A and FIG. 134E are adrenal gland. FIG. 134B and FIG. 134F are breast. FIG. 134C and FIG. 134G are fallopian tube. FIG. 134D and FIG. 134H are kidney. FIG. 134I and FIG. 134M are heart muscle. FIG. 134J and FIG. 134N are liver. FIG. 134K and FIG. 134O are lung. FIG. 134L and FIG. 134P are ureter. FIG. 134Q and FIG. 134U are eye. FIG. 134R and FIG. 134V are cerebral cortex. FIG. 134S and FIG. 134W are bone marrow. FIG. 134T and FIG. 134X are skeletal muscle.

[0403] FIG. 135A-135C shows photographs, array map and description of breast cancer tissue array BR1141 stained with the anti-PSMGFR antibody 18B4 at 10 ug/mL. FIG. 135A shows photographs of the tissue micro array. FIG. 135B shows map of the array with abbreviated tissue descriptors. FIG. 135C detailed description of the tissue micro array with non-identifying donor data.

[0404] FIG. 136A-136F shows photographs of specific tissues from breast cancer tissue array BR1141 stained with the anti-PSMGFR antibody 18B4 at 10 ug/mL, magnified to 6× and 20×. FIG. 136A and FIG. 136D are photographs of a Grade 2 invasive ductal carcinoma. FIG. 136B and FIG. 136E are photographs of a Grade 2 invasive ductal carcinoma. FIG. 136C and FIG. 136F are photographs of a Grade 2 invasive ductal carcinoma.

[0405] FIG. 137A-137C shows photographs, array map and description of esophageal cancer tissue array BC001113 stained with the anti-PSMGFR antibody 18B4 at 10 ug/mL. FIG. 137A shows photographs of the tissue micro array. FIG. 137B shows map of the array with abbreviated tissue descriptors. FIG. 137C detailed description of the tissue micro array with non-identifying donor data.

[0406] FIG. 138A-138F shows photographs of specific tissues from esophageal cancer tissue array BC001113 stained with the anti-PSMGFR antibody 18B4 at 10 ug/mL, magnified to 6× and 20×. FIG. 138A and FIG. 138D are photographs of the specimen at position A1. FIG. 138B and FIG. 138E are photographs of the specimen at position A7. FIG. 138C and FIG. 138F are photographs of the specimen at position A8.

[0407] FIG. 139A-139C shows photographs, array map and description of FDA normal tissue array MNO1021 stained with the anti-PSMGFR antibody 18G12 at 10 ug/mL. FIG. 139A shows photographs of the tissue micro array. FIG. 139B shows map of the array with abbreviated tissue descriptors. FIG. 139C detailed description of the tissue micro array with non-identifying donor data.

[0408] FIG. 140A-140X shows photographs of specific tissues from FDA normal tissue array MNO1021 stained with the anti-PSMGFR antibody 18G12 at 10 ug/mL, magnified to 6× and 20×. FIG. 140A and FIG. 140E are adrenal gland. FIG. 140B and FIG. 140F are breast. FIG. 140C and FIG. 140G are fallopian tube. FIG. 140D and FIG. 140H are kidney. FIG. 140I and FIG. 140M are heart muscle. FIG. 140J and FIG. 140N are liver. FIG. 140K and FIG. 140O are lung. FIG. 140L and FIG. 140P are ureter. FIG. 140Q and FIG. 140U are eye. FIG. 140R and FIG. 140V are cerebral cortex. FIG. 140S and FIG. 140W are bone marrow. FIG. 140T and FIG. 140X are skeletal muscle.

[0409] FIG. 141A-141C shows photographs, array map and description of breast cancer tissue array BR1141 stained with the anti-PSMGFR antibody 18G12 at 15 ug/mL. FIG. 141A shows photographs of the tissue micro array. FIG. 141B shows map of the array with abbreviated tissue descriptors. FIG. 141C detailed description of the tissue micro array with non-identifying donor data.

[0410] FIG. 142A-142F shows photographs of specific tissues from breast cancer tissue array BR1141 stained with the anti-PSMGFR antibody 18G12 at 15 ug/mL, magnified to 6× and 20×. FIG. 142A and FIG. 142D are photographs of a Grade 2 invasive ductal carcinoma. FIG. 142B and FIG. 142E are photographs of a Grade 2 invasive ductal carcinoma. FIG. 142C and FIG. 142F are photographs of a Grade 2 invasive ductal carcinoma.

[0411] FIG. 143A-143C shows photographs, array map and description of pancreatic cancer tissue array PA1003 stained with the anti-PSMGFR antibody 18G12 at 15 ug/mL. FIG. 143A shows photographs of the tissue micro array. FIG. 143B shows map of the array with abbreviated tissue descriptors. FIG. 143C detailed description of the tissue micro array with non-identifying donor data.

[0412] FIG. 144A-144F shows photographs of specific tissues from pancreatic cancer tissue array PA1003 stained with the anti-PSMGFR antibody 18G12 at 15 ug/mL, magnified to 6× and 20×. FIG. 144A and FIG. 144D are photographs of a Grade 2 adenocarcinoma. FIG. 144B and FIG. 144E are photographs of a Grade 2 adenocarcinoma. FIG. 144C and FIG. 144F are photographs of a Grade 2-3 adenocarcinoma with lymph node involvement.

[0413] FIG. 145A-145C shows photographs, array map and description of esophageal cancer tissue array BC001113 stained with the anti-PSMGFR antibody 18G12 at 30 ug/mL. FIG. 145A shows photographs of the tissue micro array. FIG. 145B shows map of the array with abbreviated tissue descriptors. FIG. 145C detailed description of the tissue micro array with non-identifying donor data.

[0414] FIG. 146A-146F shows photographs of specific tissues from esophageal cancer tissue array BC001113 stained with the anti-PSMGFR antibody 18G12 at 30 ug/mL, magnified to 6× and 20×. FIG. 146A and FIG. 146D are photographs of the specimen at position A1. FIG. 146B and FIG. 146E are photographs of the specimen at position A7. FIG. 146C and FIG. 146F are photographs of the specimen at position A8.

[0415] FIG. 147A-147C shows photographs, array map and description of FDA normal tissue array MNO1021 stained with the anti-PSMGFR antibody 25E6 at 5.0 ug/mL. FIG. 147A shows photographs of the tissue micro array. FIG. 147B shows map of the array with abbreviated tissue descriptors. FIG. 147C detailed description of the tissue micro array with non-identifying donor data.

[0416] FIG. 148A-148X shows photographs of specific tissues from FDA normal tissue array 1021 stained with the anti-PSMGFR antibody 25E6 at 5.0 ug/mL, magnified to 6× and 20×. FIG. 148A and FIG. 148E are adrenal gland. FIG. 148B and FIG. 148F are breast. FIG. 148C and FIG. 148G are fallopian tube. FIG. 148D and FIG. 148H are kidney. FIG. 148I and FIG. 148M are heart muscle. FIG. 148J and FIG. 148N are liver. FIG. 148K and FIG. 148O are lung. FIG. 148L and FIG. 148P are ureter. FIG. 148Q and FIG. 148U are eye. FIG. 148R and FIG. 148V are cerebral cortex. FIG. 148S and FIG. 148W are bone marrow. FIG. 148T and FIG. 148X are skeletal muscle.

[0417] FIG. 149A-149C shows photographs, array map and description of breast cancer tissue array BR1141 stained with the anti-PSMGFR antibody 25E6 at 5.0 ug/mL. FIG. 149A shows photographs of the tissue micro array. FIG. 149B shows map of the array with abbreviated tissue descriptors. FIG. 149C detailed description of the tissue micro array with non-identifying donor data.

[0418] FIG. 150A-150F shows photographs of specific tissues from breast cancer tissue array BR1141 stained with the anti-PSMGFR antibody 25E6 at 5.0 ug/mL, magnified to 6× and 20×. FIG. 150A and FIG. 150D are photographs of a Grade 2 invasive ductal carcinoma. FIG. 150B and FIG. 150E are photographs of a Grade 2 invasive ductal carcinoma. FIG. 150C and FIG. 150F are photographs of a Grade 2 invasive ductal carcinoma.

[0419] FIG. 151A-151C shows photographs, array map and description of pancreatic cancer tissue array PA1003 stained with the anti-PSMGFR antibody 25E6 at 5.0 ug/mL. FIG. 151A shows photographs of the tissue micro array. FIG. 151B shows map of the array with abbreviated tissue descriptors. FIG. 151C detailed description of the tissue micro array with non-identifying donor data.

[0420] FIG. 152A-152F shows photographs of specific tissues from pancreatic cancer tissue array PA1003 stained with the anti-PSMGFR antibody 25E6 at 5.0 ug/mL, magnified to 6× and 20×. FIG. 152A and FIG. 152D are photographs of a Grade 2 adenocarcinoma. FIG. 152B and FIG. 152E are photographs of a Grade 1 adenocarcinoma. FIG. 152C and FIG. 152F are photographs of a Grade 1 adenocarcinoma.

[0421] FIG. 153A-153C shows photographs, array map and description of FDA normal tissue array MNO1021 stained with the anti-PSMGFR antibody 28F9 at 15.0 ug/mL. FIG. 153A shows photographs of the tissue micro array. FIG. 153B shows map of the array with abbreviated tissue descriptors. FIG. 153C detailed description of the tissue micro array with non-identifying donor data.

[0422] FIG. 154A-154X shows photographs of specific tissues from FDA normal tissue array MNO1021 stained with the anti-PSMGFR antibody 28F9 at 15.0 ug/mL, magnified to 6× and 20×. FIG. 154A and FIG. 154E are adrenal gland. FIG. 154B and FIG. 154F are breast. FIG. 154C and FIG. 154G are fallopian tube. FIG. 154D and FIG. 154H are kidney. FIG. 154I and FIG. 154M are heart muscle. FIG. 154J and FIG. 154N are liver. FIG. 154K and FIG. 154O are lung. FIG. 154L and FIG. 154P are ureter. FIG. 154Q and FIG. 154U are eye. FIG. 154R and FIG. 154V are cerebral cortex. FIG. 154S and FIG. 154W are bone marrow. FIG. 154T and FIG. 154X are skeletal muscle.

[0423] FIG. 155A-155C shows photographs, array map and description of breast cancer tissue array BR1141 stained with the anti-PSMGFR antibody 28F9 at 15.0 ug/mL. FIG. 155A shows photographs of the tissue micro array. FIG. 155B shows map of the array with abbreviated tissue descriptors. FIG. 155C detailed description of the tissue micro array with non-identifying donor data.

[0424] FIG. 156A-156F shows photographs of specific tissues from breast cancer tissue array BR1141 stained with the anti-PSMGFR antibody 28F9 at 15.0 ug/mL, magnified to 6× and 20×. FIG. 156A and FIG. 156D are photographs of a Grade 2 invasive ductal carcinoma. FIG. 156B and FIG. 156E are photographs of a Grade 2 invasive ductal carcinoma. FIG. 156C and FIG. 156F are photographs of a Grade 2 invasive ductal carcinoma.

[0425] FIG. 157A-157C shows photographs, array map and description of FDA normal tissue array MNO1021 stained with the N+20/C-27 antibody 1E4 at 7.5 ug/mL. FIG. 157A shows photographs of the tissue micro array. FIG. 157B shows map of the array with abbreviated tissue descriptors. FIG. 157C detailed description of the tissue micro array with non-identifying donor data.

[0426] FIG. 158A-158X shows photographs of specific tissues from FDA normal tissue array MNO1021 stained with the N+20/C-27 antibody 1E4 at 7.5 ug/mL, magnified to 6× and 20×. FIG. 158A and FIG. 158E are adrenal gland. FIG. 158B and FIG. 158F are breast.

[0427] FIG. 158C and FIG. 158G are fallopian tube. FIG. 158D and FIG. 158H are kidney. FIG. 158I and FIG. 158M are heart muscle. FIG. 158J and FIG. 158N are liver. FIG. 158K and FIG. 158O are lung. FIG. 158L and FIG. 158P are ureter. FIG. 158Q and FIG. 158U are eye. FIG. 158R and FIG. 158V are cerebral cortex. FIG. 158S and FIG. 158W are bone marrow. FIG. 158T and FIG. 158X are skeletal muscle.

[0428] FIG. 159A-159C shows photographs, array map and description of breast cancer tissue array BR1007 stained with the N+20/C-27 antibody 1E4 at 10.0 ug/mL. FIG. 159A shows photographs of the tissue micro array. FIG. 159B shows map of the array with abbreviated tissue descriptors. FIG. 159C detailed description of the tissue micro array with non-identifying donor data.

[0429] FIG. 160A-160F shows photographs of specific tissues from breast cancer tissue array BR1007 stained with the N+20/C-27 antibody 1E4 at 10.0 ug/mL, magnified to 6× and 20×. FIG. 160A and FIG. 160D are photographs of a Grade 2 invasive ductal carcinoma with positive lymph nodes. FIG. 160B and FIG. 160E are photographs of a Grade 2 invasive ductal carcinoma. FIG. 160C and FIG. 160F are photographs of a Grade 2 invasive ductal carcinoma.

[0430] FIG. 161A-161C shows photographs, array map and description of FDA normal tissue array MNO1021 stained with the N+20/C-27 antibody 29H1 at 0.5 ug/mL. FIG. 161A shows photographs of the tissue micro array. FIG. 161B shows map of the array with abbreviated tissue descriptors. FIG. 161C detailed description of the tissue micro array with non-identifying donor data.

[0431] FIG. 162A-162X shows photographs of specific tissues from FDA normal tissue array MNO1021 stained with the N+20/C-27 antibody 29H1 at 0.5 ug/mL, magnified to 6× and 20×. FIG. 162A and FIG. 162E are adrenal gland. FIG. 162B and FIG. 162F are breast.

[0432] FIG. 162C and FIG. 162G are fallopian tube. FIG. 162D and FIG. 162H are kidney. FIG. 162I and FIG. 162M are heart muscle. FIG. 162J and FIG. 162N are liver. FIG. 162K and FIG. 162O are lung. FIG. 162L and FIG. 162P are ureter. FIG. 162Q and FIG. 162U are eye. FIG. 162R and FIG. 162V are cerebral cortex. FIG. 162S and FIG. 162W are bone marrow. FIG. 162T and FIG. 162X are skeletal muscle.

[0433] FIG. 163A-163C shows photographs, array map and description of breast cancer tissue array BR1141 stained with the N+20/C-27 antibody 29H1 at 0.5 ug/mL. FIG. 163A shows photographs of the tissue micro array. FIG. 163B shows map of the array with abbreviated tissue descriptors. FIG. 163C detailed description of the tissue micro array with non-identifying donor data.

[0434] FIG. 164A-164F shows photographs of specific tissues from breast cancer tissue array BR1141 stained with the N+20/C-27 antibody 29H1 at 0.5 ug/mL, magnified to 6× and 20×. FIG. 164A and FIG. 164D are photographs of a Grade 2 invasive ductal carcinoma. FIG. 164B and FIG. 164E are photographs of a Grade 2 invasive ductal carcinoma. FIG. 164C and FIG. 164F are photographs of a Grade 2 invasive ductal carcinoma.

[0435] FIG. 165A-165C shows photographs, array map and description of pancreatic cancer tissue array PA1003 stained with the N+20/C-27 antibody 29H1 at 0.5 ug/mL. FIG. 165A shows photographs of the tissue micro array. FIG. 165B shows map of the array with abbreviated tissue descriptors. FIG. 165C detailed description of the tissue micro array with non-identifying donor data.

[0436] FIG. 166A-166F shows photographs of specific tissues from pancreatic cancer tissue array PA1003 stained with the N+20/C-27 antibody 29H1 at 0.5 ug/mL, magnified to 6× and 20×. FIG. 166A and FIG. 166D are photographs of a Grade 2 adenocarcinoma. FIG. 166B and FIG. 166E are photographs of a Grade 2 adenocarcinoma. FIG. 166C and FIG. 166F are photographs of a Grade 3 adenocarcinoma.

[0437] FIG. 167A-167C shows photographs, array map and description of FDA normal tissue array MNO1021 stained with the N+20/C-27 antibody 31A1 at 0.5 ug/mL. FIG. 167A shows photographs of the tissue micro array. FIG. 167B shows map of the array with abbreviated tissue descriptors. FIG. 167C detailed description of the tissue micro array with non-identifying donor data.

[0438] FIG. 168A-168X shows photographs of specific tissues from FDA normal tissue array MNO1021 stained with the N+20/C-27 antibody 31A1 at 0.5 ug/mL, magnified to 6× and 20×. FIG. 168A and FIG. 168E are adrenal gland. FIG. 168B and FIG. 168F are breast. FIG. 168C and FIG. 168G are fallopian tube. FIG. 168D and FIG. 168H are kidney. FIG. 168I and FIG. 168M are heart muscle. FIG. 168J and FIG. 168N are liver. FIG. 168K and FIG. 168O are lung. FIG. 168L and FIG. 168P are ureter. FIG. 168Q and FIG. 168U are eye. FIG. 168R and FIG. 168V are cerebral cortex. FIG. 168S and FIG. 168W are bone marrow. FIG. 168T and FIG. 168X are skeletal muscle.

[0439] FIG. 169A-169C shows photographs, array map and description of breast cancer tissue array BR1141 stained with the N+20/C-27 antibody 31A1 at 0.5 ug/mL. FIG. 169A shows photographs of the tissue micro array. FIG. 169B shows map of the array with abbreviated tissue descriptors. FIG. 169C detailed description of the tissue micro array with non-identifying donor data.

[0440] FIG. 170A-170F shows photographs of specific tissues from breast cancer tissue array BR1141 stained with the N+20/C-27 antibody 31A1 at 0.5 ug/mL, magnified to 6× and 20×. FIG. 170A and FIG. 170D are photographs of a Grade 2 invasive ductal carcinoma. FIG. 170B and FIG. 170E are photographs of a Grade 2 invasive ductal carcinoma. FIG. 170C and FIG. 170F are photographs of a Grade 2 invasive ductal carcinoma.

[0441] FIG. 171A-171C shows photographs, array map and description of pancreatic cancer tissue array PA1003 stained with the N+20/C-27 antibody 31A1 at 0.5 ug/mL. FIG. 171A shows photographs of the tissue micro array. FIG. 171B shows map of the array with abbreviated tissue descriptors. FIG. 171C detailed description of the tissue micro array with non-identifying donor data.

[0442] FIG. 172A-172F shows photographs of specific tissues from pancreatic cancer tissue array PA1003 stained with the N+20/C-27 antibody 31A1 at 0.5 ug/mL, magnified to 6× and 20×. FIG. 172A and FIG. 172D are photographs of a Grade 1 adenocarcinoma. FIG. 172B and FIG. 172E are photographs of a Grade 2 adenocarcinoma. FIG. 172C and FIG. 172F are photographs of a Grade 3 adenocarcinoma.

[0443] FIG. 173A-173C shows photographs, array map and description of FDA normal tissue array MNO1021 stained with the N+20/C-27 antibody 32C1 at 0.25 ug/mL. FIG. 173A shows photographs of the tissue micro array. FIG. 173B shows map of the array with abbreviated tissue descriptors. FIG. 173C detailed description of the tissue micro array with non-identifying donor data.

[0444] FIG. 174A-174X shows photographs of specific tissues from FDA normal tissue array MNO1021 stained with the N+20/C-27 antibody 32C1 at 0.25 ug/mL, magnified to 6× and 20×. FIG. 174A and FIG. 174E are adrenal gland. FIG. 174B and FIG. 174F are breast. FIG. 174C and FIG. 174G are fallopian tube. FIG. 174D and FIG. 174H are kidney. FIG. 174I and FIG. 174M are heart muscle. FIG. 174J and FIG. 174N are liver. FIG. 174K and FIG. 174O are lung. FIG. 174L and FIG. 174P are ureter. FIG. 174Q and FIG. 174U are eye. FIG. 174R and FIG. 174V are cerebral cortex. FIG. 174S and FIG. 174W are bone marrow. FIG. 174T and FIG. 174X are skeletal muscle.

[0445] FIG. 175A-175C shows photographs, array map and description of breast cancer tissue array BR1141 stained with the N+20/C-27 antibody 32C1 at 5.0 ug/mL. FIG. 175A shows photographs of the tissue micro array. FIG. 175B shows map of the array with abbreviated tissue descriptors. FIG. 175C detailed description of the tissue micro array with non-identifying donor data.

[0446] FIG. 176A-176F shows photographs of specific tissues from breast cancer tissue array BR1141 stained with the N+20/C-27 antibody 32C1 at 5.0 ug/mL, magnified to 6× and 20×. FIG. 176A and FIG. 176D are photographs of a Grade 2 invasive ductal carcinoma. FIG. 176B and FIG. 176E are photographs of a Grade 2 invasive ductal carcinoma. FIG. 176C and FIG. 176F are photographs of a Grade 2 invasive ductal carcinoma.

[0447] FIG. 177A-177C shows photographs, array map and description of esophageal cancer tissue array ES1001 stained with the N+20/C-27 antibody 32C1 at 1.0 ug/mL. FIG. 177A shows photographs of the tissue micro array. FIG. 177B shows map of the array with abbreviated tissue descriptors. FIG. 177C detailed description of the tissue micro array with non-identifying donor data.

[0448] FIG. 178A-178F shows photographs of specific tissues from esophageal cancer tissue array BC001113 stained with the N+20/C-27 antibody 32C1 at 1.0 ug/mL, magnified to 6× and 20×. FIG. 178A and FIG. 178D are photographs of a squamous cell carcinoma. FIG. 178B and FIG. 178E are photographs of an adenocarcinoma. FIG. 178C and FIG. 178F are photographs of a squamous cell carcinoma.

[0449] FIG. 179A-179C shows photographs, array map and description of FDA normal tissue array MNO1021 stained with the N+20/C-27 antibody 45C11 at 12.5 ug/mL. FIG. 179A shows photographs of the tissue micro array. FIG. 179B shows map of the array with abbreviated tissue descriptors. FIG. 179C detailed description of the tissue micro array with non-identifying donor data.

[0450] FIG. 180A-180X shows photographs of specific tissues from FDA normal tissue array MNO1021 stained with the N+20/C-27 antibody 45C11 at 12.5 ug/mL, magnified to 6× and 20×. FIG. 180A and FIG. 180E are adrenal gland. FIG. 180B and FIG. 180F are breast. FIG. 180C and FIG. 180G are fallopian tube. FIG. 180D and FIG. 180H are kidney. FIG. 180I and FIG. 180M are heart muscle. FIG. 180J and FIG. 180N are liver. FIG. 180K and FIG. 180O are lung. FIG. 180L and FIG. 180P are ureter. FIG. 180Q and FIG. 180U are eye. FIG. 180R and FIG. 180V are cerebral cortex. FIG. 180S and FIG. 180W are bone marrow. FIG. 180T and FIG. 180X are skeletal muscle.

[0451] FIG. 181A-181C shows photographs, array map and description of breast cancer tissue array BR1007 stained with the N+20/C-27 antibody 45C11 at 10.0 ug/mL. FIG. 181A shows photographs of the tissue micro array. FIG. 181B shows map of the array with abbreviated tissue descriptors. FIG. 181C detailed description of the tissue micro array with non-identifying donor data.

[0452] FIG. 182A-182F shows photographs of specific tissues from breast cancer tissue array BR1007 stained with the N+20/C-27 antibody 45C11 at 10.0 ug/mL, magnified to 6× and 20×. FIG. 182A and FIG. 182D are photographs of a Grade 2 invasive ductal carcinoma with positive lymph nodes. FIG. 182B and FIG. 182E are photographs of a Grade 2 invasive ductal carcinoma. FIG. 182C and FIG. 182F are photographs of a Grade 2 invasive ductal carcinoma.

[0453] FIG. 183A-183C shows photographs, array map and description of pancreatic cancer tissue array PA805c stained with the N+20/C-27 antibody 45C11 at 12.5 ug/mL. FIG. 183A shows photographs of the tissue micro array. FIG. 183B shows map of the array with abbreviated tissue descriptors. FIG. 183C detailed description of the tissue micro array with non-identifying donor data.

[0454] FIG. 184A-184F shows photographs of specific tissues from pancreatic cancer tissue array PA805c stained with the N+20/C-27 antibody 45C11 at 12.5 ug/mL, magnified to 6× and 20×. FIG. 184A and FIG. 184D are photographs of a Grade 2 papillary adenocarcinoma. FIG. 184B and FIG. 184E are photographs of a Grade 2-3 ductal carcinoma. FIG. 184C and FIG. 184F are photographs of a Grade 3 invasive adenocarcinoma.

[0455] FIG. 185A-185C shows photographs, array map and description of FDA normal tissue array MNO1021 stained with the N+9/C-9 antibody 3C5 at 10.0 ug/mL. FIG. 185A shows photographs of the tissue micro array. FIG. 185B shows map of the array with abbreviated tissue descriptors. FIG. 185C detailed description of the tissue micro array with non-identifying donor data.

[0456] FIG. 186A-186X shows photographs of specific tissues from FDA normal tissue array MNO1021 stained with the N+9/C-9 antibody 3C5 at 10.0 ug/mL, magnified to 6× and 20×. FIG. 186A and FIG. 186E are adrenal gland. FIG. 186B and FIG. 186F are breast. FIG. 186C and FIG. 186G are fallopian tube. FIG. 186D and FIG. 186H are kidney. FIG. 186I and FIG. 186M are heart muscle. FIG. 186J and FIG. 186N are liver. FIG. 186K and FIG. 186O are lung. FIG. 186L and FIG. 186P are ureter. FIG. 186Q and FIG. 186U are eye. FIG. 186R and FIG. 186V are cerebral cortex. FIG. 186S and FIG. 186W are bone marrow. FIG. 186T and FIG. 186X are skeletal muscle.

[0457] FIG. 187A-187C shows photographs, array map and description of pancreatic cancer tissue array PA1003 stained with the N+9/C-9 antibody 3C5 at 10.0 ug/mL. FIG. 187A shows photographs of the tissue micro array. FIG. 187B shows map of the array with abbreviated tissue descriptors. FIG. 187C detailed description of the tissue micro array with non-identifying donor data.

[0458] FIG. 188A-188F shows photographs of specific tissues from pancreatic cancer tissue array PA1003 stained with the N+9/C-9 antibody 3C5 at 10.0 ug/mL, magnified to 6× and 20×. FIG. 188A and FIG. 188D are photographs of a Grade 2 adenocarcinoma. FIG. 188B and FIG. 188E are photographs of a Grade 2 adenocarcinoma. FIG. 188C and FIG. 188F are photographs of a Grade 2-3 adenocarcinoma with lymph node involvement.

[0459] FIG. 189A-189C shows photographs, array map and description of FDA normal tissue array MNO1021 stained with the N+9/C-9 antibody 8A9 at 15.0 ug/mL. FIG. 189A shows photographs of the tissue micro array. FIG. 189B shows map of the array with abbreviated tissue descriptors. FIG. 189C detailed description of the tissue micro array with non-identifying donor data.

[0460] FIG. 190A-190X shows photographs of specific tissues from FDA normal tissue array MNO1021 stained with the N+9/C-9 antibody 8A9 at 15.0 ug/mL, magnified to 6× and 20×. FIG. 190A and FIG. 190E are adrenal gland. FIG. 190B and FIG. 190F are breast. FIG. 190C and FIG. 190G are fallopian tube. FIG. 190D and FIG. 190H are kidney. FIG. 190I and FIG. 190M are heart muscle. FIG. 190J and FIG. 190N are liver. FIG. 190K and FIG. 190O are lung. FIG. 190L and FIG. 190P are ureter. FIG. 190Q and FIG. 190U are eye. FIG. 190R and FIG. 190V are cerebral cortex. FIG. 190S and FIG. 190W are bone marrow. FIG. 190T and FIG. 190X are skeletal muscle.

[0461] FIG. 191A-191C shows photographs, array map and description of pancreatic cancer tissue array PA1003 stained with the N+9/C-9 antibody 8A9 at 15.0 ug/mL. FIG. 191A shows photographs of the tissue micro array. FIG. 191B shows map of the array with abbreviated tissue descriptors. FIG. 191C detailed description of the tissue micro array with non-identifying donor data.

[0462] FIG. 192A-192F shows photographs of specific tissues from pancreatic cancer tissue array PA1003 stained with the N+9/C-9 antibody 8A9 at 15.0 ug/mL, magnified to 6× and 20×. FIG. 192A and FIG. 192D are photographs of a Grade 2 adenocarcinoma. FIG. 192B and FIG. 192E are photographs of a Grade 2 adenocarcinoma. FIG. 192C and FIG. 192F are photographs of a Grade 2 adenocarcinoma.

[0463] FIG. 193A-193C shows photographs, array map and description of FDA normal tissue array MNO1021 stained with the N+9/C-9 antibody 17H6 at 30.0 ug/mL. FIG. 193A shows photographs of the tissue micro array. FIG. 193B shows map of the array with abbreviated tissue descriptors. FIG. 193C detailed description of the tissue micro array with non-identifying donor data.

[0464] FIG. 194A-194X shows photographs of specific tissues from FDA normal tissue array MNO1021 stained with the N+9/C-9 antibody 17H6 at 30.0 ug/mL, magnified to 6× and 20×. FIG. 194A and FIG. 194E are adrenal gland. FIG. 194B and FIG. 194F are breast. FIG. 194C and FIG. 194G are fallopian tube. FIG. 194D and FIG. 194H are kidney. FIG. 194I and FIG. 194M are heart muscle. FIG. 194J and FIG. 194N are liver. FIG. 194K and FIG. 194O are lung. FIG. 194L and FIG. 194P are ureter. FIG. 194Q and FIG. 194U are eye. FIG. 194R and FIG. 194V are cerebral cortex. FIG. 194S and FIG. 194W are bone marrow. FIG. 194T and FIG. 194X are skeletal muscle.

[0465] FIG. 195A-195C shows photographs, array map and description of pancreatic cancer tissue array PA805c stained with the N+9/C-9 antibody 17H6 at 30.0 ug/mL. FIG. 195A shows photographs of the tissue micro array. FIG. 195B shows map of the array with abbreviated tissue descriptors. FIG. 195C detailed description of the tissue micro array with non-identifying donor data.

[0466] FIG. 196A-196F shows photographs of specific tissues from pancreatic cancer tissue array PA805c stained with the N+9/C-9 antibody 17H6 at 30.0 ug/mL, magnified to 6× and 20×. FIG. 196A and FIG. 196D are photographs of a Grade 2 papillary adenocarcinoma. FIG. 196B and FIG. 196E are photographs of a Grade 2-3 ductal carcinoma with lymph node involvement. FIG. 196C and FIG. 196F are photographs of a Grade 3 invasive adenocarcinoma.

[0467] FIG. 197A-197C shows photographs, array map and description of FDA normal tissue array MNO1021 stained with the N+9/C-9 antibody 39H5 at 5.0 ug/mL. FIG. 197A shows photographs of the tissue micro array. FIG. 197B shows map of the array with abbreviated tissue descriptors. FIG. 197C detailed description of the tissue micro array with non-identifying donor data.

[0468] FIG. 198A-198X shows photographs of specific tissues from FDA normal tissue array MNO1021 stained with the N+9/C-9 antibody 39H5 at 5.0 ug/mL, magnified to 6× and 20×. FIG. 198A and FIG. 198E are adrenal gland. FIG. 198B and FIG. 198F are breast. FIG. 198C and FIG. 198G are fallopian tube. FIG. 198D and FIG. 198H are kidney. FIG. 198I and FIG. 198M are heart muscle. FIG. 198J and FIG. 198N are liver. FIG. 198K and FIG. 198O are lung. FIG. 198L and FIG. 198P are ureter. FIG. 198Q and FIG. 198U are eye. FIG. 198R and FIG. 198V are cerebral cortex. FIG. 198S and FIG. 198W are bone marrow. FIG. 198T and FIG. 198X are skeletal muscle.

[0469] FIG. 199A-199C shows photographs, array map and description of pancreatic cancer tissue array PA1003 stained with the N+9/C-9 antibody 39H5 at 5.0 ug/mL. FIG. 199A shows photographs of the tissue micro array. FIG. 199B shows map of the array with abbreviated tissue descriptors. FIG. 199C detailed description of the tissue micro array with non-identifying donor data.

[0470] FIG. 200A-200F shows photographs of specific tissues from pancreatic cancer tissue array PA1003 stained with the N+9/C-9 antibody 39H5 at 5.0 ug/mL, magnified to 6× and 20×. FIG. 200A and FIG. 200D are photographs of a Grade 2 adenocarcinoma. FIG. 200B and FIG. 200E are photographs of a Grade 2 adenocarcinoma. FIG. 200C and FIG. 200F are photographs of a Grade 2 adenocarcinoma.

[0471] FIG. 201A-201C show graphs of ELISA assays to determine the binding of another set of antibodies generated by immunizing animals with the PSMGFR peptide. FIG. 201A shows binding to the PSMGFR peptide. FIG. 201B shows binding to the N-10 peptide. FIG. 201C shows binding to the C-10 peptide. As can be seen, none of the antibodies bound to the C-10 peptide. F3, B12, B2, B7, B9, 8C7F3 and H11 all bound to the PSMGFR peptide and to the N-10 peptide.

[0472] FIG. 202A-202C shows photographs of pancreatic cancer tissue array PA1003 that has been stained with monoclonal antibody 1E4, monoclonal antibody 18B4 or the polyclonal anti-PSMGFR antibody SDIX. 18B4 binds to the GTINVHDVET epitope at the most N-terminal portion of the PSMGFR peptide, while the 1E4 antibody binds to the QFNQYKTEA epitope that is immediately adjacent and C-terminal to the 18B4 epitope.

[0473] FIG. 203A-203F shows magnified images of the tissue specimen at position A2 of the pancreatic cancer array PA1003. FIG. 203A and FIG. 203B show the specimen stained with antibody 1E4. FIG. 203C and FIG. 203D show the specimen stained with antibody 18B4. FIG. 203E and FIG. 203F show the specimen stained with polyclonal antibody SDIX.

[0474] FIG. 204A-204D shows magnified images of the tissue specimen at position D4 of the pancreatic array PA1003. FIG. 204A and FIG. 204B show the specimen stained with antibody 18B4. FIG. 204C and FIG. 204D show the specimen stained with polyclonal antibody SDIX.

[0475] FIG. 205A-205D shows magnified images of the tissue specimen at position E1 of the pancreatic cancer array PA1003. FIG. 205A and FIG. 205B show the specimen stained with antibody 18B4. FIG. 205C and FIG. 205D show the specimen stained with polyclonal antibody SDIX.

[0476] FIG. 206A-206D shows magnified images of the tissue specimen at position C3 of the pancreatic cancer array PA1003. FIG. 206A and FIG. 206B show the specimen stained with antibody 1E4. FIG. 206C and FIG. 206D show the specimen stained with polyclonal antibody SDIX.

[0477] FIG. 207A-207D shows magnified images of the tissue specimen at position D1 of the pancreatic cancer array PA1003. FIG. 207A and FIG. 207B show the specimen stained with antibody 1E4. FIG. 207C and FIG. 207D show the specimen stained with polyclonal antibody SDIX.

[0478] FIG. 208A-208C shows photographs of the pancreatic cancer array PA1003. FIG. 208A shows the specimen stained with polyclonal antibody SDIX. FIG. 208B shows the specimen stained with antibody 20A10. FIG. 208C shows the specimen stained with antibody 29H1.

[0479] FIG. 209A-209D shows photographs of the esophageal cancer array ES1001 stained with various antibodies. FIG. 209A shows the array stained with polyclonal antibody SDIX. FIG. 209B shows the array stained with antibody 20A10. FIG. 209C shows the array stained with antibody 29H1. FIG. 209D shows the array stained with antibody 31A1.

[0480] FIG. 210A-210C shows photographs of the pancreatic cancer array PA1003 stained with various antibodies. FIG. 210A shows the array stained with polyclonal antibody SDIX. FIG. 210B shows the array stained with antibody 20A10. FIG. 210C shows the array stained with antibody 29H1.

[0481] FIG. 211A-211C show graphs of an ELISA experiment measuring the amount of IL-18 secreted into the condition media of MUC1* positive cancer cells co-cultured with huMNC2-CAR44 T cells wherein the cells also bear an NFAT inducible IL-18. FIG. 211A shows the graph of IL-18 secreted into the supernatant of T47D breast cancer cells co-cultured with untransduced human T cells. FIG. 211B shows the graph of IL-18 secreted into the supernatant of T47D breast cancer cells co-cultured with huMNC2-CAR44 T cells that also bore an NFAT inducible IL-18 gene inserted into a portion of the Foxp3 enhancer. FIG. 211C shows the graph of IL-18 secreted into the supernatant of T47D breast cancer cells co-cultured with huMNC2-CAR44 T cells that also bore an NFAT inducible IL-18 gene inserted into a portion of the IL-2 enhancer.

[0482] FIG. 212A-212X shows photographs of T47D breast cancer cells (red) doped with varying percentages of T47D cells engineered to express more MUC1* (green). The target cancer cells have been co-cultured with huMNC2-CAR44 T cells with NFAT inducible IL-18 wherein the IL-18 gene has been inserted into either the Foxp3 enhancer/promoter or the IL-2 enhancer/promoter. FIGS. 212A-212C, 212I-212K, and 212Q-212S show the cancer cells co-cultured with untranduced T cells. FIGS. 212D-212F, 212L-212N, and 212T-212V show the cancer cells co-cultured with hiMNC2-CAR44 T cells with the NFAT inducible IL-18 gene inserted into the Foxp3 enhancer/promoter. FIGS. 212G-212H, 2120-212P, and 212W-212X show the cancer cells co-cultured with hiMNC2-CAR44 T cells with the NFAT inducible IL-18 gene inserted into the IL-2 enhancer/promoter.

[0483] FIG. 213A-213B shows graphs of ELISA experiments in which levels of IL-18 secreted into the conditioned media are measured for huMNC1-CAR44 T cells with NFAT inducible IL-18 gene, inserted into the Foxp3 enhancer or promoter, co-cultured with either MUC1* positive cancer cells or MUC1 negative non-cancerous cells. FIG. 213A shows IL-18 secretion from huMNC2-CAR44 T cells with NFAT inducible IL-18 in co-culture with T47D breast cancer cells where the population has been doped with 5%, 10% or 30% T47D cells that had been transfected with even more MUC1*. FIG. 213B shows IL-18 secretion from huMNC2-CAR44 T cells with NFAT inducible IL-18 in co-culture with non-cancerous, MUC1 negative HEK293 cells where the cell population has been doped with 5%, 10% or 30% T47D cells that had been transfected with more MUC1*.

[0484] FIG. 214A-214X shows photographs of T47D breast cancer cells (red) or non-cancerous HEK293 cells (also red), where both cell types have been doped with varying percentages of T47D cells engineered to express more MUC1* (green). These target cancer cells have been co-cultured with huMNC2-CAR44 T cells with NFAT inducible IL-18 wherein the IL-18 gene has been inserted into the Foxp3 enhancer/promoter. FIG. 214A-214F shows either T47D cells or HEK293 cells that have not been doped with T47D cells engineered to express high MUC1* density. FIG. 214G-214L shows either T47D cells or HEK293 cells that have been doped with 5% T47D cells engineered to express high MUC1* density. FIG. 214M-214R shows either T47D cells or HEK293 cells that have been doped with 10% T47D cells engineered to express high MUC1* density. FIG. 2145-214X shows either T47D cells or HEK293 cells that have been doped with 30% T47D cells engineered to express high MUC1* density. FIGS. 214A-B, G-H, M-N, and S-T show T47D breast cancer cells. FIGS. 214C-F, I-L, O-R, and U-X show HEK293 cells. As can be seen in the figures, the induced secretion of IL-18 resulted in low MUC1* density T47D cells being killed but did not induce non-specific killing of the MUC1* negative HEK293 cells.

[0485] FIG. 215A-215C shows the consensus sequences of the heavy chain CDRs wherein the consensus sequences were generated for each group of antibodies that bound to the same epitope in the PSMGFR and N-terminally extended PSMGFR peptide. FIG. 215A shows consensus sequences for heavy chain CDR1. FIG. 215B shows consensus sequences for heavy chain CDR2. FIG. 215C shows consensus sequences for heavy chain CDR3.

[0486] FIG. 216A-216C shows the consensus sequences of the light chain CDRs wherein the consensus sequences were generated for each group of antibodies that bound to the same epitope in the PSMGFR and N-terminally extended PSMGFR peptide. FIG. 216A shows consensus sequences for light chain CDR1. FIG. 216B shows consensus sequences for light chain CDR2. FIG. 216C shows consensus sequences for light chain CDR3.

[0487] FIG. 217 shows alternative formats for bispecific antibodies and other bispecific immunotherapeutics subdivided into five major classes: BsIgG, appended IgG, BsAb fragments, bispecific fusion proteins and BsAb conjugates. Heavy chains are shown in dark blue, dark pink and dark green and corresponding light chains are in lighter shades of the same colors. Connecting peptide linkers are shown by thin black lines and engineered disulfide bonds by thin green lines. Approximate molecular weights are shown assuming ˜12.5 kDa per immunoglobulin domain. BsAb formats that have advanced into clinical testing are highlighted (*). For interpretation of the references to color in this figure description, the reader is referred to the web version of the article, Spiess et al. Molecular Immunology 67, 95-106 (2015), the contents of which are incorporated by reference in their entirety, in particular with respect to the description of FIG. 1 of Spiess et al., as well as other descriptions of various methods of making and using bispecific antibody fragments).

[0488] FIG. 218 shows graphs of tumor volume measured by an IVIS instrument wherein the tumor cells have been genetically modified to express Luciferase. The substrate Luciferin was injected 10 minutes before the photo emissions were measured in the sedated animal. On Day 1 of the experiment, animals were injected sub-cutaneously with 250,000 human breast tumor cells. Tumors were made heterogeneous, comprised of two different tumor cell types. A first tumor cell population was T47D-wt, a breast cancer cell line that expresses both full-length MUC1 and the growth factor receptor form MUC1*, which we engineered to express mCherry fluorescence. The second tumor cell population was the same T47D breast cancer cells, except that they had been stably transduced to express even more MUC1* and GFP fluorescence, referred to here as T47D-MUC1*. In this experiment, animals were implanted with T47D-wt plus T47D-MUC1*, wherein the population of T47D-MUC1* made up 30%, 15% or 7.5% of the tumor population. Animals were then administered a one-time injection of either PBS, huMNC2-41BB-3z CAR T cells (4-1BB), huMNC2-CD28-3z CAR T cells (CD28) or huMNC2-CD28-1XX CAR T cells (CD28-1XX or 1XX). The CAR T cells were injected into the tail vein at an Effector to Target ratio (E:T) of 10:1, 5:1, or 1:1.

[0489] FIG. 219A-219B shows IVIS photographs and graphs of IVIS tumor volume measurement. FIG. 219A shows photographs of the mice that had been implanted with tumors in which 30% of the cancer cell population was T47D-MUC1*, referred to here as high antigen expressing cells. The various CAR T cells were administered at a CAR T to tumor cell ratio of 10:1 wherein 250,000 tumor cells were implanted and the animals were injected 5 days later with 2,500,000 CAR T cells. FIG. 219B shows a graph of the tumor volume by IVIS measurement by day. As can be seen, animals injected with the huMNC2-CD28-1XX had much smaller tumors than the animals treated huMNC2-4-1BB-3z or huMNC2-CD28-3z, which is the same CAR T except without the 1XX mutations in the CD3-zeta domain.

[0490] FIG. 220A-220T shows the IVIS graphs for 30% tumors treated at a CAR T to Tumor ratio of 10:1. Here graphs are shown for each individual animal rather than the average of the treatment group.

[0491] FIG. 221A-221B shows IVIS photographs and graphs of IVIS tumor volume measurement. FIG. 221A shows photographs of the mice that had been implanted with tumors in which 30% of the cancer cell population was T47D-MUC1*, referred to here as high antigen expressing cells. The various CAR T cells were administered at a CAR T to tumor cell ratio of 1:1 wherein 250,000 tumor cells were implanted and the animals were injected 5 days later with 250,000 CAR T cells. FIG. 221B shows a graph of the tumor volume by IVIS measurement by day. As can be seen, animals injected with the huMNC2-CD28-1XX had much smaller tumors than the animals treated huMNC2-4-1BB-3z or huMNC2-CD28-3z, which is the same CAR T except without the 1XX mutations in the CD3-zeta domain. However, with the lower dose of CAR T cells, even tumors in the huMNC2-CD28-1XX treated group begin to grow again.

[0492] FIG. 222A-222T shows the IVIS graphs for 30% tumors treated at a CAR T to Tumor ratio of 1:1. Here graphs are shown for each individual animal rather than the average of the treatment group.

[0493] FIG. 223A-223B shows IVIS photographs and graphs of IVIS tumor volume measurement. FIG. 223A shows photographs of the mice that had been implanted with tumors in which 7.5% of the cancer cell population was T47D-MUC1*, referred to here as high antigen expressing cells. The various CAR T cells were administered at a CAR T to tumor cell ratio of 10:1 wherein 250,000 tumor cells were implanted and the animals were injected 5 days later with 2,500,000 CAR T cells. FIG. 223B shows a graph of the tumor volume by IVIS measurement by day. As can be seen, animals injected with the huMNC2-CD28-1XX had much smaller tumors than the animals treated huMNC2-4-1BB-3z or huMNC2-CD28-3z, which is the same CAR T except without the 1XX mutations in the CD3-zeta domain. However, even tumors in the huMNC2-CD28-1XX treated group begin to grow again, which is consistent with the idea that a small percentage of high antigen expressing tumor cells impedes the killing of the rest of the tumor.

[0494] FIG. 224A-224T shows the IVIS graphs for 7.5% tumors treated at a CAR T to Tumor ratio of 10:1. Here graphs are shown for each individual animal rather than the average of the treatment group.

[0495] FIG. 225A-225B shows IVIS photographs and graphs of IVIS tumor volume measurement. FIG. 225A shows photographs of the mice that had been implanted with tumors in which 7.5% of the cancer cell population was T47D-MUC1*, referred to here as high antigen expressing cells. The various CAR T cells were administered at a CAR T to tumor cell ratio of 1:1 wherein 250,000 tumor cells were implanted and the animals were injected 5 days later with 250,000 CAR T cells. FIG. 225B shows a graph of the tumor volume by IVIS measurement by day. As can be seen, animals injected with the huMNC2-CD28-1XX had smaller tumors than the animals treated huMNC2-4-1BB-3z or huMNC2-CD28-3z, which is the same CAR T except without the 1XX mutations in the CD3-zeta domain. However, at low antigen density combined with very low dose of CAR T cells, even tumors in the huMNC2-CD28-1XX treated group begin to grow again.

[0496] FIG. 226A-226T shows the IVIS graphs for 7.5% tumors treated at a CAR T to Tumor ratio of 1:1. Here graphs are shown for each individual animal rather than the average of the treatment group.

[0497] FIG. 227 shows the tabulation of CD3 positive human T cells that were harvested from the spleens of the test animals post sacrifice. In this table, cells isolated from mice implanted with tumors comprised of 30% T47D-MUC1* and treated with CAR T cells at a 10:1 ratio. As can be seen, the huMNC2-CD28-1XX treated mice, that had smaller tumors, have the greater numbers of CAR T cells and CD8 positive killer T cells. TIM3, LAG3 and PD-1 are molecular markers of T cell exhaustion. The table shows that the huMNC2-CD28-1XX CAR T cells harvested from the animals express lower levels of exhaustion markers, consistent with the idea that the 1XX mutations in CD3-zeta increase CAR T cell persistence in vivo.

[0498] FIG. 228 shows the tabulation of CD3 positive human T cells that were harvested from the spleens of the test animals post sacrifice. In this table, cells isolated from mice implanted with tumors comprised of 30% T47D-MUC1* and treated with CAR T cells at a 1:1 ratio. As can be seen, the huMNC2-CD28-1XX treated mice, that had smaller tumors, have the greater numbers of CAR T cells and CD8 positive killer T cells. TIM3, LAG3 and PD-1 are molecular markers of T cell exhaustion. The table shows that the huMNC2-CD28-1XX CAR T cells harvested from the animals express lower levels of exhaustion markers, consistent with the idea that the 1XX mutations in CD3-zeta increase CAR T cell persistence in vivo.

[0499] FIG. 229 shows the tabulation of CD3 positive human T cells that were harvested from the blood of the test animals post sacrifice. In this table, cells isolated from mice implanted with tumors comprised of 30% T47D-MUC1* and treated with CAR T cells at a 1:1 ratio. As can be seen, the huMNC2-CD28-1XX treated mice, that had smaller tumors, have the greater numbers of CAR T cells and CD8 positive killer T cells and have lower levels of T cell exhaustion markers.

[0500] FIG. 230 shows the tabulation of CD3 positive human T cells that were harvested from the spleens of the test animals post sacrifice. In this table, cells isolated from mice implanted with tumors comprised of 7.5% T47D-MUC1* and treated with CAR T cells at a 10:1 ratio. As can be seen, the huMNC2-CD28-1XX treated mice, that had smaller tumors, have the greater numbers of CAR T cells and CD8 positive killer T cells. TIM3, LAG3 and PD-1 are molecular markers of T cell exhaustion. The table shows that the huMNC2-CD28-1XX CAR T cells harvested from the animals express lower levels of exhaustion markers, consistent with the idea that the 1XX mutations in CD3-zeta increase CAR T cell persistence in vivo.

[0501] FIG. 231 shows the tabulation of CD3 positive human T cells that were harvested from the blood of the test animals post sacrifice. In this table, cells isolated from mice implanted with tumors comprised of 7.5% T47D-MUC1* and treated with CAR T cells at a 10:1 ratio. As can be seen, the huMNC2-CD28-1XX treated mice, that had smaller tumors, have the greater numbers of CAR T cells and CD8 positive killer T cells. TIM3, LAG3 and PD-1 are molecular markers of T cell exhaustion. The table shows that the huMNC2-CD28-1XX CAR T cells harvested from the animals express lower levels of exhaustion markers, consistent with the idea that the 1XX mutations in CD3-zeta increase CAR T cell persistence in vivo.

[0502] FIG. 232 shows the tabulation of CD3 positive human T cells that were harvested from the spleens of the test animals post sacrifice. In this table, cells isolated from mice implanted with tumors comprised of 7.5% T47D-MUC1* and treated with CAR T cells at a 1:1 ratio. As can be seen, the huMNC2-CD28-1XX treated mice, that had smaller tumors, have the greater numbers of CAR T cells and CD8 positive killer T cells. TIM3, LAG3 and PD-1 are molecular markers of T cell exhaustion. The table shows that the huMNC2-CD28-1XX CAR T cells harvested from the animals express lower levels of exhaustion markers, consistent with the idea that the 1XX mutations in CD3-zeta increase CAR T cell persistence in vivo.

[0503] FIG. 233 shows the tabulation of CD3 positive human T cells that were harvested from the blood of the test animals post sacrifice. In this table, cells isolated from mice implanted with tumors comprised of 7.5% T47D-MUC1* and treated with CAR T cells at a 1:1 ratio. As can be seen, the huMNC2-CD28-1XX treated mice, that had smaller tumors, have the greater numbers of CAR T cells and CD8 positive killer T cells. TIM3, LAG3 and PD-1 are molecular markers of T cell exhaustion. The table shows that the huMNC2-CD28-1XX CAR T cells harvested from the animals express lower levels of exhaustion markers, consistent with the idea that the 1XX mutations in CD3-zeta increase CAR T cell persistence in vivo.

[0504] FIG. 234A-234U shows photographs of the tumors excised from test animals and shows their weight in grams. Tumors were excised from animals implanted with tumors made up of 30% T47D-MUC1* high antigen density cells and 70% T47D-wt low antigen density cells. Animals were treated with CAR T cells at an effector to target ratio of 10:1.

[0505] FIG. 235A-235N2 shows magnified photographs of dissociated tumors excised from animals implanted with tumors made up of 30% T47D-MUC1* high antigen density cells and 70% T47D-wt low antigen density cells. Animals were treated with CAR T cells at an effector to target ratio of 10:1. Shown are overlays of bright field images and fluorescent images, wherein the red fluorescence, mCherry, shows the low antigen density cells and the green fluorescence, GFP, shows the low antigen density cells. FIG. 235A-235J show tumor cells excised from the control animals treated only with PBS. FIG. 235K-235T show tumor cells excised from the animals treated with huMNC2-41BB-3z CAR T cells. FIG. 235U-235D2 show tumor cells excised from the animals treated with huMNC2-CD28-1XX CAR T cells. FIG. 235E2-235N2 show tumor cells excised from the animals treated with huMNC2-CD28-3z CAR T cells.

[0506] FIG. 236A-236U shows photographs of the tumors excised from test animals and shows their weight in grams. Tumors were excised from animals implanted with tumors made up of 30% T47D-MUC1* high antigen density cells and 70% T47D-wt low antigen density cells. Animals were treated with CAR T cells at an effector to target ratio of 1:1. FIG. 236A-236E show tumors excised from animals mock treated with PBS. FIG. 236F-236J show tumors excised from animals treated with huMNC2-41BB-3z. FIG. 236K-2360 show tumors excised from animals treated with huMNC2-CD28-1XX. FIG. 236P-236T show tumors excised from animals treated with huMNC2-CD28-3z. FIG. 236U shows a bar graph of the weights of tumors excised from the test animals.

[0507] FIG. 237A-237D2 shows magnified photographs of dissociated tumors excised from animals implanted with tumors made up of 30% T47D-MUC1* high antigen density cells and 70% T47D-wt low antigen density cells. Animals were treated with CAR T cells at an effector to target ratio of 1:1. Shown are overlays of bright field images and fluorescent images, wherein the red fluorescence, mCherry, shows the low antigen density cells and the green fluorescence, GFP, shows the low antigen density cells. FIG. 237A-237J show tumor cells excised from the control animals treated only with PBS. FIG. 237K-237T show tumor cells excised from the animals treated with huMNC2-41BB-3z CAR T cells. FIG. 237U-237D2 show tumor cells excised from the animals treated with huMNC2-CD28-1XX CAR T cells. FIG. 237E2-237N2 show tumor cells excised from the animals treated with huMNC2-CD28-3z CAR T cells.

[0508] FIG. 238A-238T shows photographs of the tumors excised from test animals and shows their weight in grams. Tumors were excised from animals implanted with tumors made up of 7.5% T47D-MUC1* high antigen density cells and 92.5% T47D-wt low antigen density cells. Animals were treated with CAR T cells at an effector to target ratio of 10:1.

[0509] FIG. 239A-239M2 shows magnified photographs of dissociated tumors excised from animals implanted with tumors made up of 7.5% T47D-MUC1* high antigen density cells and 92.5% T47D-wt low antigen density cells. Animals were treated with CAR T cells at an effector to target ratio of 10:1. Shown are overlays of bright field images and fluorescent images, wherein the red fluorescence, mCherry, shows the low antigen density cells and the green fluorescence, GFP, shows the low antigen density cells. FIG. 239A-239J show tumor cells excised from animals mock treated with PBS. FIG. 239K-239T show tumor cells excised from the animals treated with huMNC2-41BB-3z CAR T cells. FIG. 239U-239C2 show tumor cells excised from the animals treated with huMNC2-CD28-1XX CAR T cells. FIG. 239D2-239M2 show tumor cells excised from the animals treated with huMNC2-CD28-3z CAR T cells.

[0510] FIG. 240A-2400 shows photographs of the tumors excised from test animals and shows their weight in grams. Tumors were excised from animals implanted with tumors made up of 7.5% T47D-MUC1* high antigen density cells and 92.5% T47D-wt low antigen density cells. Animals were treated with CAR T cells at an effector to target ratio of 1:1.

[0511] FIG. 241A-241D2 shows magnified photographs of dissociated tumors excised from animals implanted with tumors made up of 7.5% T47D-MUC1* high antigen density cells and 92.5% T47D-wt low antigen density cells. Animals were treated with CAR T cells at an effector to target ratio of 1:1. Shown are overlays of bright field images and fluorescent images, wherein the red fluorescence, mCherry, shows the low antigen density cells and the green fluorescence, GFP, shows the low antigen density cells. FIG. 241A-241J show tumor cells excised from control animals treated only with PBS. FIG. 241K-241T show tumor cells excised from the animals treated with huMNC2-41BB-3z CAR T cells. FIG. 241U-241D2 show tumor cells excised from the animals treated with huMNC2-CD28-1XX CAR T cells. FIG. 241E2-241N2 show tumor cells excised from the animals treated with huMNC2-CD28-3z CAR T cells.

[0512] FIG. 242A-242R shows photographs of live animals, where IVIS measures tumor volume, mCherry detects the low antigen cells within the tumor and GFP detects the high antigen cells within the tumor. Post sacrifice photographs are shown of the excised tumors and a graph of tumor weights. A graph of the GFP positive high antigen tumor cells is also shown. Both the live GFP photographs and the graph of FACS measurement of high antigen cells show that huMNC2-CD28-1XX has killed all the high antigen cells and most of the low antigen cells even with the lowest levels of high antigen cells in the tumor and at very low dose of CAR T cells.

[0513] FIG. 243A-243F shows photographs taken at two different timepoints. Here, IVIS photographs measure tumor volume, mCherry fluorescent photographs measure low antigen cells and GFP fluorescent photographs measure high antigen cells. In this case, the animals were implanted with tumors made up of 30% high antigen density cells (GFP+) and 70% low antigen density cells (mCherry+). Animals had been given a single dose of CAR T cells at a 10:1 or a 1:1 CAR T to tumor cell ratio.

[0514] FIG. 244 shows graphs of IVIS tumor volume measurements over time. Arrows indicate timepoints when fluorescent photographs, mCherry and GFP, of live animals were taken. In this case, the animals were implanted with tumors made up of 30% high antigen density cells (GFP+) and 70% low antigen density cells (mCherry+). Animals had been given a single dose of CAR T cells at a 10:1 or a 1:1 CAR T to tumor cell ratio.

[0515] FIG. 245 shows graphs of IVIS measurements of tumor volume, mCherry measurements of the growth rate of low antigen cells and GFP measurements of the growth rate of high antigen cells, between two timepoints. As can be seen, at high CAR T dose, there is no increase in the number of high antigen density cells (GFP) over time in mice treated with either huMNC2-41BB-3z or huMNC2-CD28-1XX. However, at low CAR T dose there is some of the mice treated with huMNC2-41BB-3z do show an increase in the growth of high antigen density cells, whereas mice treated with huMNC2-CD28-1XX do not. More importantly, at high or low CAR T dose, mice treated with huMNC2-41BB-3z show increases in the growth of low antigen density cells, whereas in mice treated with huMNC2-CD28-1XX the growth of low antigen density cells is more controlled.

[0516] FIG. 246A-246B shows IVIS photographs and graphs of IVIS tumor volume measurement. FIG. 246A shows photographs of the mice that had been implanted with tumors in which 15% of the cancer cell population was T47D-MUC1*, referred to here as high antigen expressing cells. The various CAR T cells were administered at a CAR T to tumor cell ratio of 10:1 wherein 250,000 tumor cells were implanted and the animals were injected 5 days later with 2,500,000 CAR T cells. FIG. 246B shows a graph of the tumor volume by IVIS measurement by day. In this experiment, on Day 52, animals outlined in red were implanted with 250,000 more 100% high antigen density tumor cells. The animals outlined in green received an additional dose of 2,500,000 CAR T cells.

[0517] FIG. 247A-247T shows graphs of the IVIS measured growth of the tumors in each individual animal. The red arrows indicate injection of more tumor cells and the green arrows indicate injection of 2,500,000 additional CAR T cells. As can be seen, the injection of additional tumor cells does not increase the tumor growth in animals treated with huMNC2-CD28-1XX CAR T cells. However, the injection of additional tumor cells does increase tumor growth in animals treated with huMNC2-CD28-3z or huMNC2-41BB-3z CAR T cells. This result is consistent with CAR T cells with 1XX mutations in CD3z prolong CAR T cell persistence in vivo. It can also be seen that the injection of additional CAR T cells suppressed tumor cells in some of the animals in all groups. This is consistent with the idea that tumor recurrence was not due to tumor escape because the fresh CAR T cells still recognized the tumor cells and killed them.

[0518] FIG. 248A-247D shows a cartoon of the experimental strategy wherein animals were implanted with heterologous tumors comprised of two cell types that carry two different florescent labels. Animals were implanted with both T47D breast cancer cells that bear mCherry and fluoresce red and also implanted with T47D cells that have been engineered to express even more MUC1* and bear GFP making them fluoresce green. FIG. 248A shows cartoon of animals implanted with tumors in which 30% of the tumors express high levels of MUC1* and those tumor cells fluoresce green. FIG. 248B shows cartoon of animals implanted with tumors in which 15% of the tumors express high levels of MUC1* and those tumor cells fluoresce green. FIG. 248C shows cartoon of animals implanted with tumors in which 7.5% of the tumors express high levels of MUC1* and those tumor cells fluoresce green. FIG. 248D lists the variables used in these experiments.

[0519] FIG. 249A-247F shows cartoons of the experimental strategy and data. FIG. 249A shows cartoons of MUC1 full-length as it appears on normal epithelial cells. FIG. 249B shows four tissue specimens stained with huMNC2-scFv-Fc. FIG. 249C shows cartoons depicting heterogeneous tumors expressing either high (30%-left) or low (7.5%-right) percentages of high MUC1* expressing tumor cells. FIG. 249D shows flow cytometry verifying the percentages of the heterogeneous tumors before their implantation. FIG. 249E shows bar graphs of bioluminescence measured on an IVIS instrument for animals implanted with 30% high MUC1* cells and treated with the various CAR T cells at an effector to target ratio of 10:1 (top) or 1:1 (bottom). FIG. 249F shows bar graphs of bioluminescence measured on an IVIS instrument for animals implanted with 7.5% high MUC1* cells and treated with the various CAR T cells at an effector to target ratio of 10:1 (top) or 1:1 (bottom).

[0520] FIG. 250A-250F shows bar graphs of bioluminescence of the tumors measured on an IVIS instrument for animals implanted with 30% high MUC1* cells or 7.5% high MUC1* tumors and treated with the various CAR T cells at various effector to target ratios. FIG. 250A shows IVIS graph of animals implanted with tumors in which 30% expressed high levels of MUC1* and where animals were treated with CAR T cells at an effector to target ratio of 10:1. FIG. 250B shows IVIS graph where effector to target ratio was 5:1. FIG. 250C shows IVIS graph where effector to target ratio was 1:1. FIG. 250D shows IVIS graph of animals implanted with tumors in which 7.5% expressed high levels of MUC1* and where animals were treated with CAR T cells at an effector to target ratio of 10:1. FIG. 250E shows IVIS graph where effector to target ratio was 5:1. FIG. 250F shows IVIS graph where effector to target ratio was 1:1.

[0521] FIG. 251A-251D shows photographs of bioluminescence of the tumors measured on an IVIS instrument for animals implanted with 30% high MUC1* cells or 7.5% high MUC1* tumors and treated with the various CAR T cells at effector to target ratios of 10:1 or 1:1. FIG. 251A shows IVIS photographs for animals implanted with tumors in which 30% expressed high levels of MUC1* and where animals were treated with of CAR T cells at an effector to target ratio of 10:1. FIG. 250B shows IVIS photographs where effector to target ratio was 1:1. FIG. 251C shows IVIS photographs for animals implanted with tumors in which 7.5% expressed high levels of MUC1* and where animals were treated with of CAR T cells at an effector to target ratio of 10:1. FIG. 250D shows IVIS photographs where effector to target ratio was 1:1.

[0522] FIG. 252A-252D shows magnified fluorescent photographs of dissociated tumors excised from animals implanted with tumors made up of either 30% or 7.5% T47D-MUC1* high antigen density cells and the remainder are low antigen density cells. Animals were treated with various CAR T cells at effector to target ratios of either 10:1 or 1:1. Shown are overlays of bright field images and fluorescent images, wherein the red fluorescence, mCherry, shows the low antigen density cells and the green fluorescence, GFP, shows the low antigen density cells. FIG. 252A shows tumor cells excised from animals implanted with 30% high antigen density tumors and treated with various CAR T cells at effector to target ratio of 10:1. FIG. 252B shows tumor cells excised from animals implanted with 30% high antigen density tumors and treated with various CAR T cells at effector to target ratio of 1:1. FIG. 252C shows tumor cells excised from animals implanted with 7.5% high antigen density tumors and treated with various CAR T cells at effector to target ratio of 10:1. FIG. 252D shows tumor cells excised from animals implanted with 7.5% high antigen density tumors and treated with various CAR T cells at effector to target ratio of 1:1.

[0523] FIG. 253A-253H shows cartoons of the experimental strategy and data. FIG. 253A shows cartoons of MUC1 full-length as it appears on normal epithelial cells. FIG. 253B shows four tissue specimens stained with huMNC2-scFv-Fc. FIG. 253C shows cartoons depicting heterogeneous tumors expressing either high or low percentages of high MUC1* expressing tumor cells. FIG. 253D shows flow cytometry verifying 15% percent of the tumor cells expressed high levels of MUC1* before their implantation. FIG. 253E shows bar graphs of bioluminescence measured on an IVIS instrument for animals implanted with 15% high MUC1* cells and treated with the various CAR T cells at an effector to target ratio of 10:1. FIG. 253F shows immunofluorescent photographs of the excised tumors for animals implanted with 15% high antigen density tumors and treated with the various CAR Ts at an effector to target ratio of 10:1. FIG. 253G shows bar graphs of bioluminescence measured on an IVIS instrument for animals implanted with 15% high MUC1* cells and treated with the various CAR T cells at an effector to target ratio of 1:1. FIG. 253H shows immunofluorescent photographs of the excised tumors for animals implanted with 15% high antigen density tumors and treated with the various CAR Ts at an effector to target ratio of 1:1.

[0524] FIG. 254A-254B shows bar graphs of bioluminescence measured on an IVIS instrument for animals implanted with 15% high MUC1* cells and treated with the various CAR T cells at an effector to target ratio of 10:1. FIG. 254A shows the graph of animals treated at an effector to target ratio of 10:1. FIG. 254B shows the graph of animals treated at an effector to target ratio of 1:1.

[0525] FIG. 255A-255B shows photographs of bioluminescence of tumors measured on an IVIS instrument for animals implanted with 15% high MUC1* cells and treated with the various CAR T cells at an effector to target ratio of 10:1. FIG. 255A shows the photographs of animals treated at an effector to target ratio of 10:1. FIG. 255B shows the photographs of animals treated at an effector to target ratio of 1:1.

[0526] FIG. 256A-256B shows fluorescent photographs of the excised tumors showing the mCherry positive, low antigen density cells in red and the GFP positive, high antigen density cells in green. Animals were all implanted with a mixture of tumor cells that before implantation were 15% high MUC1* expressing cells. FIG. 256A shows the photographs of animals treated at an effector to target ratio of 10:1. FIG. 256B shows the photographs of animals treated at an effector to target ratio of 1:1.

[0527] FIG. 257 shows a table of results of flow cytometry in which cells of the excised tumors were assayed for the presence of human T cells and CAR T cells, which were then enumerated and analyzed for the presence of markers of T cell exhaustion. Shown here is the analysis of tumors excised from animals that had been implanted with tumors that were 30% high antigen expressing cells, wherein animals were treated with various CAR T cells and an effector to target ratio of 10:1. When the number of CAR T cells detected was less than 25, that number is shown in red and the further analysis of those few cells is called into question.

[0528] FIG. 258 shows a table of results of flow cytometry in which cells of the excised tumors were assayed for the presence of human T cells and CAR T cells, which were then enumerated and analyzed for the presence of markers of T cell exhaustion. Shown here is the analysis of tumors excised from animals that had been implanted with tumors that were 15% high antigen expressing cells, wherein animals were treated with various CAR T cells and an effector to target ratio of 10:1. When the number of CAR T cells detected was less than 25, that number is shown in red and the further analysis of those few cells is called into question.

[0529] FIG. 259 shows a table of results of flow cytometry in which cells of the excised tumors were assayed for the presence of human T cells and CAR T cells, which were then enumerated and analyzed for the presence of markers of T cell exhaustion. Shown here is the analysis of tumors excised from animals that had been implanted with tumors that were 7.5% high antigen expressing cells, wherein animals were treated with various CAR T cells and an effector to target ratio of 10:1. When the number of CAR T cells detected was less than 25, that number is shown in red and the further analysis of those few cells is called into question.

[0530] FIG. 260 shows a table of results of flow cytometry in which cells of the excised tumors were assayed for the presence of human T cells and CAR T cells, which were then enumerated and analyzed for the presence of markers of T cell exhaustion. Shown here is the analysis of tumors excised from animals that had been implanted with tumors that were 30% high antigen expressing cells, wherein animals were treated with various CAR T cells and an effector to target ratio of 5:1. When the number of CAR T cells detected was less than 25, that number is shown in red and the further analysis of those few cells is called into question.

[0531] FIG. 261 shows a table of results of flow cytometry in which cells of the excised tumors were assayed for the presence of human T cells and CAR T cells, which were then enumerated and analyzed for the presence of markers of T cell exhaustion. Shown here is the analysis of tumors excised from animals that had been implanted with tumors that were 7.5% high antigen expressing cells, wherein animals were treated with various CAR T cells and an effector to target ratio of 5:1. When the number of CAR T cells detected was less than 25, that number is shown in red and the further analysis of those few cells is called into question.

[0532] FIG. 262 shows a table of results of flow cytometry in which cells of the excised tumors were assayed for the presence of human T cells and CAR T cells, which were then enumerated and analyzed for the presence of markers of T cell exhaustion. Shown here is the analysis of tumors excised from animals that had been implanted with tumors that were 30% high antigen expressing cells, wherein animals were treated with various CAR T cells and an effector to target ratio of 1:1. When the number of CAR T cells detected was less than 25, that number is shown in red and the further analysis of those few cells is called into question.

[0533] FIG. 263 shows a table of results of flow cytometry in which cells of the excised tumors were assayed for the presence of human T cells and CAR T cells, which were then enumerated and analyzed for the presence of markers of T cell exhaustion. Shown here is the analysis of tumors excised from animals that had been implanted with tumors that were 15% high antigen expressing cells, wherein animals were treated with various CAR T cells and an effector to target ratio of 1:1. When the number of CAR T cells detected was less than 25, that number is shown in red and the further analysis of those few cells is called into question.

[0534] FIG. 264 shows a table of results of flow cytometry in which cells of the excised tumors were assayed for the presence of human T cells and CAR T cells, which were then enumerated and analyzed for the presence of markers of T cell exhaustion. Shown here is the analysis of tumors excised from animals that had been implanted with tumors that were 7.5% high antigen expressing cells, wherein animals were treated with various CAR T cells and an effector to target ratio of 1:1. When the number of CAR T cells detected was less than 25, that number is shown in red and the further analysis of those few cells is called into question.

[0535] FIG. 265 shows a table of results of flow cytometry in which cells of the excised spleens of the treated animals were assayed for the presence of human T cells and CAR T cells, which were then enumerated and analyzed for the presence of markers of T cell exhaustion. Shown here is the analysis of tumors excised from animals that had been implanted with tumors that were 30% high antigen expressing cells, wherein animals were treated with various CAR T cells and an effector to target ratio of 10:1. When the number of CAR T cells detected was less than 25, that number is shown in red and the further analysis of those few cells is called into question.

[0536] FIG. 266 shows a table of results of flow cytometry in which cells of the excised spleens of the treated animals were assayed for the presence of human T cells and CAR T cells, which were then enumerated and analyzed for the presence of markers of T cell exhaustion. Shown here is the analysis of tumors excised from animals that had been implanted with tumors that were 15% high antigen expressing cells, wherein animals were treated with various CAR T cells and an effector to target ratio of 10:1. When the number of CAR T cells detected was less than 25, that number is shown in red and the further analysis of those few cells is called into question.

[0537] FIG. 267 shows a table of results of flow cytometry in which cells of the excised spleens of the treated animals were assayed for the presence of human T cells and CAR T cells, which were then enumerated and analyzed for the presence of markers of T cell exhaustion. Shown here is the analysis of tumors excised from animals that had been implanted with tumors that were 7.5% high antigen expressing cells, wherein animals were treated with various CAR T cells and an effector to target ratio of 10:1. When the number of CAR T cells detected was less than 25, that number is shown in red and the further analysis of those few cells is called into question.

[0538] FIG. 268 shows a table of results of flow cytometry in which cells of the excised spleens of the treated animals were assayed for the presence of human T cells and CAR T cells, which were then enumerated and analyzed for the presence of markers of T cell exhaustion. Shown here is the analysis of tumors excised from animals that had been implanted with tumors that were 30% high antigen expressing cells, wherein animals were treated with various CAR T cells and an effector to target ratio of 5:1. When the number of CAR T cells detected was less than 25, that number is shown in red and the further analysis of those few cells is called into question.

[0539] FIG. 269 shows a table of results of flow cytometry in which cells of the excised spleens of the treated animals were assayed for the presence of human T cells and CAR T cells, which were then enumerated and analyzed for the presence of markers of T cell exhaustion. Shown here is the analysis of tumors excised from animals that had been implanted with tumors that were 15% high antigen expressing cells, wherein animals were treated with various CAR T cells and an effector to target ratio of 5:1. When the number of CAR T cells detected was less than 25, that number is shown in red and the further analysis of those few cells is called into question.

[0540] FIG. 270 shows a table of results of flow cytometry in which cells of the excised spleens of the treated animals were assayed for the presence of human T cells and CAR T cells, which were then enumerated and analyzed for the presence of markers of T cell exhaustion. Shown here is the analysis of tumors excised from animals that had been implanted with tumors that were 7.5% high antigen expressing cells, wherein animals were treated with various CAR T cells and an effector to target ratio of 5:1. When the number of CAR T cells detected was less than 25, that number is shown in red and the further analysis of those few cells is called into question.

[0541] FIG. 271 shows a table of results of flow cytometry in which cells of the excised spleens of the treated animals were assayed for the presence of human T cells and CAR T cells, which were then enumerated and analyzed for the presence of markers of T cell exhaustion. Shown here is the analysis of tumors excised from animals that had been implanted with tumors that were 30% high antigen expressing cells, wherein animals were treated with various CAR T cells and an effector to target ratio of 1:1. When the number of CAR T cells detected was less than 25, that number is shown in red and the further analysis of those few cells is called into question.

[0542] FIG. 272 shows a table of results of flow cytometry in which cells of the excised spleens of the treated animals were assayed for the presence of human T cells and CAR T cells, which were then enumerated and analyzed for the presence of markers of T cell exhaustion. Shown here is the analysis of tumors excised from animals that had been implanted with tumors that were 15% high antigen expressing cells, wherein animals were treated with various CAR T cells and an effector to target ratio of 1:1. When the number of CAR T cells detected was less than 25, that number is shown in red and the further analysis of those few cells is called into question.

[0543] FIG. 273 shows a table of results of flow cytometry in which cells of the excised spleens of the treated animals were assayed for the presence of human T cells and CAR T cells, which were then enumerated and analyzed for the presence of markers of T cell exhaustion. Shown here is the analysis of tumors excised from animals that had been implanted with tumors that were 7.5% high antigen expressing cells, wherein animals were treated with various CAR T cells and an effector to target ratio of 1:1. When the number of CAR T cells detected was less than 25, that number is shown in red and the further analysis of those few cells is called into question.

[0544] FIG. 274 shows a table of results of flow cytometry in which blood from the treated animals were assayed for the presence of human T cells and CAR T cells, which were then enumerated and analyzed for the presence of markers of T cell exhaustion. Shown here is the analysis of tumors excised from animals that had been implanted with tumors that were 30% high antigen expressing cells, wherein animals were treated with various CAR T cells and an effector to target ratio of 10:1. When the number of CAR T cells detected was less than 25, that number is shown in red and the further analysis of those few cells is called into question.

[0545] FIG. 275 shows a table of results of flow cytometry in which blood from the treated animals were assayed for the presence of human T cells and CAR T cells, which were then enumerated and analyzed for the presence of markers of T cell exhaustion. Shown here is the analysis of tumors excised from animals that had been implanted with tumors that were 15% high antigen expressing cells, wherein animals were treated with various CAR T cells and an effector to target ratio of 10:1. When the number of CAR T cells detected was less than 25, that number is shown in red and the further analysis of those few cells is called into question.

[0546] FIG. 276 shows a table of results of flow cytometry in which blood from the treated animals were assayed for the presence of human T cells and CAR T cells, which were then enumerated and analyzed for the presence of markers of T cell exhaustion. Shown here is the analysis of tumors excised from animals that had been implanted with tumors that were 7.5% high antigen expressing cells, wherein animals were treated with various CAR T cells and an effector to target ratio of 10:1. When the number of CAR T cells detected was less than 25, that number is shown in red and the further analysis of those few cells is called into question.

[0547] FIG. 277 shows a table of results of flow cytometry in which blood from the treated animals were assayed for the presence of human T cells and CAR T cells, which were then enumerated and analyzed for the presence of markers of T cell exhaustion. Shown here is the analysis of tumors excised from animals that had been implanted with tumors that were 30% high antigen expressing cells, wherein animals were treated with various CAR T cells and an effector to target ratio of 5:1. When the number of CAR T cells detected was less than 25, that number is shown in red and the further analysis of those few cells is called into question.

[0548] FIG. 278 shows a table of results of flow cytometry in which blood from the treated animals were assayed for the presence of human T cells and CAR T cells, which were then enumerated and analyzed for the presence of markers of T cell exhaustion. Shown here is the analysis of tumors excised from animals that had been implanted with tumors that were 15% high antigen expressing cells, wherein animals were treated with various CAR T cells and an effector to target ratio of 5:1. When the number of CAR T cells detected was less than 25, that number is shown in red and the further analysis of those few cells is called into question.

[0549] FIG. 279 shows a table of results of flow cytometry in which blood from the treated animals were assayed for the presence of human T cells and CAR T cells, which were then enumerated and analyzed for the presence of markers of T cell exhaustion. Shown here is the analysis of tumors excised from animals that had been implanted with tumors that were 7.5% high antigen expressing cells, wherein animals were treated with various CAR T cells and an effector to target ratio of 5:1. When the number of CAR T cells detected was less than 25, that number is shown in red and the further analysis of those few cells is called into question.

[0550] FIG. 280 shows a table of results of flow cytometry in which blood from the treated animals were assayed for the presence of human T cells and CAR T cells, which were then enumerated and analyzed for the presence of markers of T cell exhaustion. Shown here is the analysis of tumors excised from animals that had been implanted with tumors that were 30% high antigen expressing cells, wherein animals were treated with various CAR T cells and an effector to target ratio of 1:1. When the number of CAR T cells detected was less than 25, that number is shown in red and the further analysis of those few cells is called into question.

[0551] FIG. 281 shows a table of results of flow cytometry in which blood from the treated animals were assayed for the presence of human T cells and CAR T cells, which were then enumerated and analyzed for the presence of markers of T cell exhaustion. Shown here is the analysis of tumors excised from animals that had been implanted with tumors that were 15% high antigen expressing cells, wherein animals were treated with various CAR T cells and an effector to target ratio of 1:1. When the number of CAR T cells detected was less than 25, that number is shown in red and the further analysis of those few cells is called into question.

[0552] FIG. 282 shows a table of results of flow cytometry in which blood from the treated animals were assayed for the presence of human T cells and CAR T cells, which were then enumerated and analyzed for the presence of markers of T cell exhaustion. Shown here is the analysis of tumors excised from animals that had been implanted with tumors that were 7.5% high antigen expressing cells, wherein animals were treated with various CAR T cells and an effector to target ratio of 1:1. When the number of CAR T cells detected was less than 25, that number is shown in red and the further analysis of those few cells is called into question.

[0553] FIG. 283A-283L shows photographs of MUC1* positive breast cancer cells, T47D, in culture with human T cells to which have been added various concentrations of bispecific antibody 20A10-OKT3-BiTE. 20A10 is a humanized anti-MUC1* antibody and OKT3 is an antibody that binds to CD3 that is present on human T cells. As can be seen in the figure, the addition of the bispecific antibody mediates the joining together of T cells and cancer cells, seen here as cell clustering. In FIG. 283A the concentration of the bispecific antibody is 1,000 ng/mL. In FIG. 283B concentration is 333 ng/mL. In FIG. 283C concentration is 111 ng/mL. In FIG. 283D concentration is 37 ng/mL. In FIG. 283E concentration is 12.3 ng/mL. In FIG. 283F concentration is 4.1 ng/mL. In FIG. 283G concentration is 1.3 ng/mL. In FIG. 283H concentration is 0.4 ng/mL. In FIG. 283I concentration is 0.15 ng/mL. In FIG. 283J concentration is 0.05 ng/mL. FIG. 283K is a control well in which both T cells and cancer cells are present, but no bispecific antibody has been added. FIG. 283L is a control well in which bispecific antibody has been added to cancer cells, but no T cells are present.

[0554] FIG. 284A-284L shows photographs of MUC1* positive breast cancer cells, T47D, in culture with human T cells to which have been added various concentrations of bispecific antibody 20A10-12F6-BiTE. 20A10 is a humanized anti-MUC1* antibody and 12F6 is an antibody that binds to CD3 that is present on human T cells. As can be seen in the figure, the addition of the bispecific antibody mediates the joining together of T cells and cancer cells, seen here as cell clustering. In FIG. 284A the concentration of the bispecific antibody is 1,000 ng/mL. In FIG. 284B concentration is 333 ng/mL. In FIG. 284C concentration is 111 ng/mL. In FIG. 284D concentration is 37 ng/mL. In FIG. 284E concentration is 12.3 ng/mL. In FIG. 284F concentration is 4.1 ng/mL. In FIG. 284G concentration is 1.3 ng/mL. In FIG. 284H concentration is 0.4 ng/mL. In FIG. 284I concentration is 0.15 ng/mL. In FIG. 284J concentration is 0.05 ng/mL. FIG. 284K is a control well in which both T cells and cancer cells are present, but no bispecific antibody has been added. FIG. 284L is a control well in which bispecific antibody has been added to cancer cells, but no T cells are present.

[0555] FIG. 285A-285L shows photographs of HCT-MUC1*-transduced cancer cells in culture with human T cells to which have been added various concentrations of bispecific antibody 20A10-OKT3-BiTE. 20A10 is a humanized anti-MUC1* antibody and OKT3 is an antibody that binds to CD3 that is present on human T cells. As can be seen in the figure, the addition of the bispecific antibody mediates the joining together of T cells and cancer cells, seen here as cell clustering. In FIG. 285A the concentration of the bispecific antibody is 1,000 ng/mL. In FIG. 285B concentration is 333 ng/mL. In FIG. 285C concentration is 111 ng/mL. In FIG. 285D concentration is 37 ng/mL. In FIG. 285E concentration is 12.3 ng/mL. In FIG. 285F concentration is 4.1 ng/mL. In FIG. 285G concentration is 1.3 ng/mL. In FIG. 285H concentration is 0.4 ng/mL. In FIG. 285I concentration is 0.15 ng/mL. In FIG. 285J concentration is 0.05 ng/mL. FIG. 285K is a control well in which both T cells and cancer cells are present, but no bispecific antibody has been added. FIG. 285L is a control well in which bispecific antibody has been added to cancer cells, but no T cells are present.

[0556] FIG. 286A-286L shows photographs of HCT-MUC1*-transduced cancer cells in culture with human T cells to which have been added various concentrations of bispecific antibody 20A10-12F6-BiTE. 20A10 is a humanized anti-MUC1* antibody and 12F6 is an antibody that binds to CD3 that is present on human T cells. As can be seen in the figure, the addition of the bispecific antibody mediates the joining together of T cells and cancer cells, seen here as cell clustering. In FIG. 286A the concentration of the bispecific antibody is 1,000 ng/mL. In FIG. 286B concentration is 333 ng/mL. In FIG. 286C concentration is 111 ng/mL. In FIG. 286D concentration is 37 ng/mL. In FIG. 286E concentration is 12.3 ng/mL. In FIG. 286F concentration is 4.1 ng/mL. In FIG. 286G concentration is 1.3 ng/mL. In FIG. 286H concentration is 0.4 ng/mL. In FIG. 286I concentration is 0.15 ng/mL. In FIG. 286J concentration is 0.05 ng/mL. FIG. 286K is a control well in which both T cells and cancer cells are present, but no bispecific antibody has been added. FIG. 286L is a control well in which bispecific antibody has been added to cancer cells, but no T cells are present.

### DETAILED DESCRIPTION OF THE PREFERRED EMBODIMENTS

[0557] In the present application, “a” and “an” are used to refer to both single and a plurality of objects.

[0558] As used herein, occasionally, in short hand, a polypeptide is indicated as being “transduced or transfected” into a cell. In these occurrences, it is understood that the nucleic acid encoding the polypeptide sequence is transduced or transfected into the cell, as it is an impossibility that a polypeptide could be transduced or transfected into a cell.

[0559] As used herein, occasionally when referring to number of cells injected into an animal or otherwise contextually wherein the number of cells is referred to, “M” refers to millions, and “K” refers to thousands.

[0560] As used herein, interchangeable designations for various monoclonal antibodies are used, such as, “MNC2”, which is interchangeable with “C2”, “Min-C2” and “MNC2”; “MNE6”, which is interchangeable with “E6”, “Min-E6” and “MNE6”; “MNC3”, which is interchangeable with “C3”, “Min-C3” and “MNC3”; and “MNC8”, which is interchangeable with “C8”, “Min-C8” and “MNC8”. The monoclonal antibodies provided herein follow the same convention.

[0561] As used herein, “h” or “hu” placed before an antibody construct is short-hand for humanized.

[0562] As used herein, the term “antibody-like” means a molecule that may be engineered such that it contains portions of antibodies but is not an antibody that would naturally occur in nature. Examples include but are not limited to CAR (chimeric antigen receptor) T cell technology and the Ylanthia® technology. The CAR technology uses an antibody epitope fused to a portion of a T cell so that the body's immune system is directed to attack a specific target protein or cell. The Ylanthia® technology consists of an “antibody-like” library that is a collection of synthetic human Fabs that are then screened for binding to peptide epitopes from target proteins. The selected Fab regions can then be engineered into a scaffold or framework so that they resemble antibodies.

[0563] As used herein, “PSMGFR” is abbreviation for Primary Sequence of the MUC1 Growth Factor Receptor which is identified by SEQ ID NO:2, and thus is not to be confused with a six amino acid sequence. “PSMGFR peptide” or “PSMGFR region” refers to a peptide or region that incorporates the Primary Sequence of the MUC1 Growth Factor Receptor (SEQ ID NO:2).

[0564] As used herein, the “MUC1*” extra cellular domain is defined primarily by the PSMGFR sequence (GTINVHDVETQFNQYKTEAASRYNLTISDVSVSDVPFPFSAQSGA (SEQ ID NO:2)). Because the exact site of MUC1 cleavage depends on the enzyme that clips it, and that the cleavage enzyme varies depending on cell type, tissue type or the time in the evolution of the cell, the exact sequence of the MUC1* extra cellular domain may vary at the N-terminus.

[0565] Other clipped amino acid sequences may include SNIKFRPGSVVVQLTLAFREGTINVHDVETQFNQYKTEAASRY (SEQ ID NO:620); or SVVVQLTLAFREGTINVHDVETQFNQYKTEAASRY (SEQ ID NO:621).

[0566] As used herein, the term “PSMGFR” is an acronym for Primary Sequence of MUC1 Growth Factor Receptor as set forth as GTINVHDVETQFNQYKTEAASRYNLTISDVSVSDVPFPFSAQSGA (SEQ ID NO:2). In this regard, the “N-number” as in “N-10 PSMGFR” or simply “N-10”, “N-15 PSMGFR” or simply “N-15”, or “N-20 PSMGFR” or simply “N-20” refers to the number of amino acid residues that have been deleted at the N-terminal end of PSMGFR. Likewise “C-number” as in “C-10 PSMGFR” or simply “C-10”, “C-15 PSMGFR” or simply “C-15”, or “C-20 PSMGFR” or simply “C-20” refers to the number of amino acid residues that have been deleted at the C-terminal end of PSMGFR. A mixture of deletions and additions is also possible. For instance, N+20/C-27 refers to a peptide fragment of wild-type MUC1 in which 20 amino acids are added to the PSMGFR at the N-terminus and 27 amino acids are deleted from the C-terminus.

[0567] As used herein, the “extracellular domain of MUC1*” refers to the extracellular portion of a MUC1 protein that is devoid of the tandem repeat domain. In most cases, MUC1* is a cleavage product wherein the MUC1* portion consists of a short extracellular domain devoid of tandem repeats, a transmembrane domain and a cytoplasmic tail. The precise location of cleavage of MUC1 is not known perhaps because it appears that it can be cleaved by more than one enzyme. The extracellular domain of MUC1* will include most of the PSMGFR sequence but may have an additional 10-20 N-terminal amino acids.

[0568] As used herein “sequence identity” means homology in sequence of a particular polypeptide or nucleic acid to a reference sequence of nucleic acid or amino acid such that the function of the homologous peptide is the same as the reference peptide or nucleic acid. Such homology can be so close with the reference peptide such that at times the two sequences may be 90%, 95% or 98% identical yet possess the same function in binding or other biological activities.

[0569] As used herein, “MUC1 positive” cell refers to a cell that expresses a gene for MUC1, MUC1-Y or MUC1-Z or other MUC1 variant.

[0570] As used herein, “MUC1 negative” cell refers to a cell that does not express a gene for MUC1.

[0571] As used herein, “MUC1* positive” cell refers to a cell that expresses a gene for MUC1, wherein that gene's expressed protein is a transmembrane protein that is devoid of tandem repeats, which may be a consequence of post-translational modification, cleavage, alternative splicing, or transfecting or transducing a cell with a MUC1 protein that is devoid of tandem repeats.

[0572] As used herein, “MUC1* negative” cell refers to a cell that may or may not express a gene for MUC1 but does not express a MUC1 transmembrane protein that is devoid of tandem repeats.

[0573] As used herein, “MUC1 positive” cancer cell refers to a cancer cell that overexpresses the gene for MUC1, expresses MUC1 in an aberrant pattern, wherein its expression is not restricted to the apical border and/or expresses a MUC1 that is devoid of tandem repeats.

[0574] As used herein, “MUC1 negative” cancer cell refers to a cancer cell that may or may not express a gene for MUC1 but does not overexpress MUC1 or does not overexpress a MUC1 transmembrane protein that is devoid of tandem repeats.

[0575] As used herein, “MUC1* positive” cancer cell refers to a cancer cell that overexpresses a MUC1 transmembrane protein that is devoid of tandem repeats.

[0576] As used herein, “MUC1* negative” cancer cell refers to a cancer cell that may or may not express a gene for MUC1 but does not overexpress a MUC1 transmembrane protein that is devoid of tandem repeats.

[0577] As used herein “conformational epitope” refers to a peptide sequence that is required to be present in a specific three-dimensional structure or conformation for an antibody to bind. However the antibody binds when the peptide sequence is in the three-dimensional structure or conformation and is not bound when linear. A common technique for determining whether an antibody binds to a linear stretch or a conformational epitope is to use the antibody to probe a denaturing Western blot. Traveling through a denaturing gel linearizes proteins and peptides. Antibodies that do not work in a denaturing Western but do recognize the native target, for example expressed on an intact cell, are determined to recognize a conformational epitope. As used herein, the antibody may or may not actually bind to the “conformational epitope”, however the presence of the “conformational epitope” sequence is required to render a three dimensional structure so that the MUC1* region on cancer cells is able to be bound by the antibody that is specific for cancer treatment. Thus, the conformational epitope is an amino acid sequence that induces the binding of the antibody to the MUC1* region on cancer cells. Thus, a term “conformational inducing peptide sequence” may be used, which indicates that a peptide sequence is present within a larger peptide not as a binding site but that induces binding of an antibody to the larger peptide by causing a three-dimensional structure to form that facilitates the binding of the antibody to the larger peptide.

### MUC1* Antibodies (Anti-PSMGFR) for Treatment or Prevention of Cancers

[0578] We discovered that a cleaved form of the MUC1 (SEQ ID NO:1) transmembrane protein is a growth factor receptor that drives the growth of over 75% of all human solid tumor cancers. The cleaved form of MUC1, which we called MUC1* (pronounced muk 1 star), is a powerful growth factor receptor. Enzymatic cleavage releases the bulk of the MUC1 extracellular domain. It is the remaining portion comprising a truncated extracellular domain, transmembrane domain and cytoplasmic tail that is called MUC1*. Cleavage and release of the bulk of the extracellular domain of MUC1 unmasks a binding site for activating ligands dimeric NME1, NME6, NME8, NME7_{AB}, NME7-X1 or NME7. Cell growth assays show that it is ligand-induced dimerization of the MUC1* extracellular domain that promotes growth (FIG. 1A-1D). MUC1* positive cells treated with either bivalent ‘by’ anti-MUC1* antibody, monovalent ‘my’ or Fab, NM23-H1 dimers or NME7-AB. Bivalent anti-MUC1* antibodies stimulate growth of cancer cells whereas the monovalent Fab inhibits growth. Classic bell-shaped curve indicates ligand induced dimerization stimulates growth. Dimeric NM23-H1, aka NME1, stimulates growth of MUC1* positive cancer cells but siRNA to suppress MUC1 expression eliminate its effect (FIG. 1C). NME7-AB also stimulates the growth of MUC1* positive cells (FIG. 1D).

[0579] MUC1* is an excellent target for cancer drugs as it is aberrantly expressed on over 75% of all cancers and is likely overexpressed on an even higher percentage of metastatic cancers. After MUC1 cleavage, most of its extracellular domain is shed from the cell surface. The remaining portion has a truncated extracellular domain that at least comprises the primary growth factor receptor sequence, PSMGFR (SEQ ID NO:2). Antibodies that bind to the PSMGFR sequence and especially those that competitively inhibit the binding of activating ligands such as NME proteins, including NME1, NME6, NME8, NME7_{AB}, NME7-X1 and NME7, are ideal therapeutics and can be used to treat or prevent MUC1 positive or MUC1* positive cancers, as stand-alone antibodies, antibody fragments or variable region fragments thereof incorporated into multi-specific antibody-like molecules, bispecific antibodies, antibody-drug conjugates or chimeric antigen receptors also called CARs, which are then transfected or transduced into immune cells, then administered to a patient. Therapeutic anti-MUC1* antibodies can be monoclonal, polyclonal, antibody mimics, engineered antibody-like molecules, full antibodies or antibody fragments. Examples of antibody fragments include but are not limited to Fabs, scFv, and scFv-Fc. Human or humanized antibodies are preferred for use in the treatment or prevention of cancers. In any of these antibody-like molecules, mutations can be introduced to prevent or minimize dimer formation. Anti-MUC1* antibodies that are monovalent or bispecific are preferred because MUC1* function is activated by ligand induced dimerization. Typical binding assays show that NME1 and NME7A bind to the PSMGFR peptide portion of MUC1* (FIG. 2A, 2D). Further, they show that these activating growth factors bind to the membrane proximal portion of MUC1*, as they do not bind to the PSMGFR peptide if the 10 C-terminal amino acids are missing. Similarly, anti-MUC1* antibodies MNC2 and MNE6 bind to the PSMGFR peptide if an only if the 10 C-terminal amino acids are present (FIG. 2B, 2C). Antibodies MNC3 and MNC8 bind to epitopes that are different from MNC2 and MNE6, as they do not depend on the presence of the 10 C-terminal amino acids of the PSMGFR peptide (FIG. 2E, 2F). Antibodies MNC2, MNE6, 20A10, 3C2B1, 5C6F3, 25E6, 18G12, 28F9, 1E4, B12, B2, B7, B9, 8C7F3, and H11 antibody and other antibodies of the invention or fragments derived from them, can be administered to a patient for the treatment or prevention of cancers, as stand-alone antibodies or incorporated into a BiTE, an ADC, a multi-specific antibody-like molecule, bispecific antibodies, with or without an FC region or a portion of an Fc region, a bi-scFv, a di-scFv, a tandem di-scFv, a diabody, triabody, tribody, tetrabody and other antibody-like molecules that are multi-valent and multi-specific. The antibody or antibody fragment may be murine, human, humanized, camelid, rabbit or other non-human species.

[0580] BiTEs or chimeric antigen receptors also called CARs that have been transduced into immune cells. MNC2, MNE6, 20A10, 3C2B1, 5C6F3, 25E6, 18G12, 28F9, 1E4, B12, B2, B7, B9, 8C7F3, and H11 antibody and other anti-MUC1* antibodies that competitively inhibit the binding of NME1 and NME7A are preferred. The antibody or antibody fragment may be murine, human, humanized, camelid, rabbit or other non-human species.

[0581] Therapeutic anti-MUC1* antibodies for use as a stand-alone antibody therapeutic or for integration into a BiTE, a CAR, an ADC, or any of the multi-specific antibody-like molecules can be selected based on specific criteria. The parent antibody can be generated using typical methods for generating monoclonal antibodies in animals. Alternatively, they can be selected by screening antibody or antibody fragment libraries, including but not limited to strategies described in Beckman U.S. Pat. No. 9,944,719B2, which is incorporated by reference herein for description of methods of screening antibodies. Antibodies suitable for therapeutic use are chosen based on their ability to bind to a MUC1* peptide, which can be:
[0582] (i) PSMGFR region of MUC1;
[0583] (ii) PSMGFR peptide;
[0584] (iii) a peptide having amino acid sequence of QFNQYKTEAASRYNLTISDVSVSDVPFPFSAQSGA (N-10)
[0585] (iv) a peptide having amino acid sequence of
[0586] ASRYNLTISDVSVSDVPFPFSAQSGA (N-19)
[0587] (v) a peptide having amino acid sequence of
[0588] NLTISDVSVSDVPFPFSAQSGA (N-23)
[0589] (vi) a peptide having amino acid sequence of
[0590] ISDVSVSDVPFPFSAQSGA (N-26)
[0591] (vii) a peptide having amino acid sequence of
[0592] SVSDVPFPFSAQSGA (N-30)
[0593] (viii) a peptide having amino acid sequence of
[0594] QFNQYKTEAASRYNLTISDVSVSDVPFPFS (N-10/C-5)
[0595] (ix) a peptide having amino acid sequence of
[0596] ASRYNLTISDVSVSDVPFPFS (N-19/C-5) or
[0597] (x) a peptide having amino acid sequence of
[0598] FPFSAQSGA (N-36).

[0599] Resultant antibodies or antibody fragments generated or selected in this way can then be further selected by passing additional screens. For example, antibodies or antibody fragments become more preferred based on their ability to bind to MUC1* positive cancer cells or tissues but not to MUC1 negative cancer cells or to normal tissues. Further, anti-MUC1* antibodies or antibody fragments may be de-selected as anti-cancer therapeutics if they bind to stem or progenitor cells. Anti-MUC1* antibodies or antibody fragments become more preferred if they have the ability to competitively inhibit the binding of activating ligands, such as NME7_{AB} or NME7-X1, to MUC1*. FIGS. 3A-3C shows that MNE6 and MNC2 competitively inhibit the binding of activating ligands NME1 and NME7 to MUC1*.

[0600] A process for selecting anti-MUC1* antibodies for use in treating a patient diagnosed with a MUC1 positive cancer, at risk of developing a MUC1 positive cancer or suspected of having a MUC1 positive cancer comprises one or more of the following steps of selecting antibodies or antibody fragments that 1) bind to the PSMGFR peptide; 2) bind to the N-10 PSMGFR peptide; 3) selectively bind to cancer cells; 4) do not bind to C-10 PSMGFR peptide; and 5) competitively inhibited the binding of dimeric NME1 or NME7-AB to the PSMGFR peptide. For example, FIGS. 3A-3C show that monoclonals MNE6 and MNC2 satisfy all five criteria, while monoclonals MNC3 and MNC8 do not competitively inhibit the binding of activating ligands NME1 and NME7 (FIG. 3C). Recall that the MUC1* growth factor receptor is activated by ligand-induced dimerization of its extracellular domain. Therefore, the ideal antibody therapeutic, if used as a straight stand-alone antibody therapeutic, should not dimerize the MUC1* extracellular domain. For this therapeutic format, suitable antibodies in this regard include monovalent antibodies such as those generated in lamas and camels, Fabs, scFv's, single domain antibodies (sdAb), scFv-Fc as long as the Fc portion is constructed such that it does not homo-dimerize.

[0601] FACS scans show that anti-MUC1* antibodies MNC2 and MNE6 specifically bind to MUC1* positive solid tumor cancer cells and MUC1* transfected cells but not MUC1* negative or MUC1 negative cells. In one example, a humanized MNC2 scFv is shown to bind to ZR-75-1, aka 1500, MUC1* positive breast cancer cells (FIG. 4A-4C). MNE6 was shown to bind to MUC1 negative HCT-116 colon cancer cells if an only if they were transfected with MUC1*. MNE6 also bound to MUC1* positive cancer cells such as ZR-75-1, aka 1500, MUC1* positive breast cancer cells (FIG. 4D-4F). Binding assays such as ELISAs, immunofluorescence, and the like all confirm that MNC2 and MNE6 bind to the PSMGFR peptide and to live MUC1 positive cancer cells. Humanized anti-MUC1* antibodies are selected based on their ability to also bind to the PSMGFR peptide or to MUC1 positive cancer cells. FIG. 5 shows that humanized MNC2 scFv binds with high affinity to the MUC1* peptide PSMGFR with an EC-50 of about 333 nM. Humanized MNC2 scFv, like Fabs, potently inhibits the growth of MUC1* positive cancer cells as is shown in one example in FIGS. 6A, 6B. Like the parent antibodies, humanized scFv's show the same binding pattern. huMNE6-scFv binds to the PSMGFR peptide, binds to the N-10 peptide but does not bind to the C-10 peptide (SEQ ID NO:825) (FIG. 8). However, murine or humanized MNC3-scFv, which is less suitable for the treatment of cancers, binds to the, PSMGFR peptide, binds to the N-10 peptide and also binds to the C-10 peptide (FIG. 9), which we know is the epitope to which the activating ligand NME7_{AB} binds.

[0602] The Fabs of MNE6 and MNC2 or the comparable single chain variable regions derived from them potently inhibit the growth of MUC1* positive cancers in vitro and in vivo. In several examples, the Fabs of Anti-MUC1* antibodies inhibited the growth of human MUC1* positive cancers in vivo. In one case, immune-compromised mice were implanted with human breast tumors then treated with MNE6 Fab after tumor engraftment. FIG. 7A shows that MNE6 Fab potently inhibited the growth of MUC1* positive breast cancers. Female nu/nu mice implanted with 90-day estrogen pellets were implanted with 6 million T47D human breast cancer cells that had been mixed 50/50 with Matrigel. Mice bearing tumors that were at least 150 mm³ and had three successive increases in tumor volume were selected for treatment. Animals were injected sub-cutaneously twice per week with 80 mg/kg MNE6 Fab and an equal number of mice fitting the same selection criteria were injected with vehicle alone (FIG. 7A).

[0603] In another aspect, MNE6 was shown to halt the growth of prostate cancer. FIG. 7B shows that MNE6 Fab potently inhibited the growth of MUC1* positive prostate cancers. Male NOD/SCID mice were implanted with 6 million DU-145 human prostate cancer cells that had been mixed 50/50 with Matrigel. Mice bearing tumors that were at least 150 mm\hat{ }3 and had three successive increases in tumor volume were selected for treatment. Animals were injected sub-cutaneously every 48 hours with 160 mg/kg MNE6 Fab and an equal number of mice fitting the same selection criteria were injected with vehicle alone (FIG. 7B). Tumors were measured independently by two researchers twice per week and recorded. Statistics were blindly calculated by independent statistician, giving a P value of 0.0001 for each. Anti-MUC1* Fab inhibited breast cancer growth and prostate cancer growth. Treatment had no effect on weight, bone marrow cell type or number. The MNE6 Fab effectively inhibited the growth of the tumors, while the control group's tumors continued to grow until sacrifice. No adverse effects of treatment were observed or detected.

[0604] Recombinant forms of MNE6 and MNC2 were constructed that like the Fab are monomeric. In this case, MNE6 was humanized and MNC2 was humanized. There are a number of methods known to those skilled in the art for humanizing antibodies. In addition to humanizing, libraries of human antibodies or antibody fragments can be screened to identify other fully human antibodies that bind to the PSMGFR.

[0605] A single chain of the humanized MNE6 variable region, called an scFv, was genetically engineered such that it was connected to the Fc portion of the antibody (SEQ ID NO:256 and 257). Fc regions impart certain benefits to antibody fragments for use as therapeutics. The Fc portion of an antibody recruits complement, which in general means it can recruit other aspects of the immune system and thus amplify the anti-tumor response beyond just inhibiting the target. The addition of the Fc portion also increases the half-life of the antibody fragment (Czajkowsky D M, Hu J, Shao Z and Pleass R J. (2012) Fc-fusion proteins: new developments and future perspectives. EMBO Mol Med. 4(10):1015-1028). However, the Fc portion of an antibody homo-dimerizes, which in the case of anti-MUC1* antibody based therapeutics is not optimal since ligand-induced dimerization of the MUC1* receptor stimulates growth. Therefore, mutations in the Fc region that resist dimer formation are preferred for anti-MUC1* anti-cancer therapeutics. Deletion of the hinge region and other mutations in the Fc region that make the Fc-mutant resistant to dimerization were made and could be used as therapeutics.

[0606] A human or humanized MNE6 antibody or antibody fragment, Fab, MNE6 scFv or hu MNE6 scFv-Fcₘᵤₜ are effective anti-cancer agents that can be administered to a person diagnosed with a MUC1 or MUC1* positive cancer, suspected of having a MUC1 or MUC1* positive cancer or is at risk of developing a MUC1 or MUC1* positive cancer.

### Humanizing

[0607] Humanized antibodies or antibody fragments or fully human antibodies that bind to the extracellular domain of -MUC1* are preferred for therapeutic use. The techniques described herein for humanizing antibodies are but a few of a variety of methods known to those skilled in the art. The invention is not meant to be limited by the technique used to humanize the antibody.

[0608] Humanization is the process of replacing the non-human regions of a therapeutic antibody (usually mouse monoclonal antibody) by human one without changing its binding specificity and affinity. The main goal of humanization is to reduce immunogenicity of the therapeutic monoclonal antibody when administered to human. Three distinct types of humanization are possible. First, a chimeric antibody is made by replacing the non-human constant region of the antibody by the human constant region. Such antibody will contain the mouse Fab region and will contain about 80-90% of human sequence. Second, a humanized antibody is made by grafting of the mouse CDR regions (responsible of the binding specificity) onto the variable region of a human antibody, replacing the human CDR (CDR-grafting method). Such antibody will contain about 90-95% of human sequence. Third and last, a full human antibody (100% human sequence) can be created by phage display, where a library of human antibodies, antibody-like molecules or antibody fragments is screened to select antigen specific human antibody or by immunizing transgenic mice expressing human antibody.

[0609] A general technique for humanizing an antibody is practiced approximately as follows. Monoclonal antibodies are generated in a host animal, typically in mice. Monoclonal antibodies are then screened for affinity and specificity of binding to the target. Once a monoclonal antibody that has the desired effect and desired characteristics is identified, it is sequenced. The sequence of the animal-generated antibody is then aligned with the sequences of many human antibodies in order to find human antibodies with sequences that are the most homologous to the animal antibody. Biochemistry techniques are employed to paste together the human antibody sequences and the animal antibody sequences. Typically, the non-human CDRs are grafted into the human antibodies that have the highest homology to the non-human antibody. This process can generate many candidate humanized antibodies that need to be tested to identify which antibody or antibodies has the desired affinity and specificity.

[0610] Once a human antibody or a humanized antibody has been generated it can be further modified for use as an Fab fragment, as a full antibody, or as an antibody-like entity such as a single chain molecule containing the variable regions, such as scFv or an scFv-Fc. In some cases it is desirable to have Fc region of the antibody or antibody-like molecule mutated such that it does not dimerize.

[0611] In addition to methods that introduce human sequences into antibodies generated in non-human species, fully human antibodies can be obtained by a variety of methods known to those skilled in the art, including screening human antibody libraries with a peptide fragment of an antigen. A fully human antibody that functions like MNE6 or MNC2, 20A10 or other antibodies of the invention can be generated by screening a human antibody library or library of antibody fragments with a peptide having the sequence of the PSMGFR N-10 peptide. In another method, human antibodies are generated in genetically modified mice. Humanized anti-MUC1* antibodies or antibody fragments were generated based on the sequences of the mouse monoclonal antibodies MNE6, MNC2, 20A10, 3C2B1, 5C6F3 and 25E6. In one aspect of the invention, a patient diagnosed with a MUC1* positive cancer is treated with an effective amount of a murine or camelid antibody or antibody fragment comprising sequences from MNC2 (SEQ ID NO:118-119 and 168-169), MNE6 (SEQ ID NOS: 12-13 and 65-66), 20A10 (SEQ ID NOS:988-989 and 1004-1005), 3C2B1 (SEQ ID NOS:1820-1821 and 1822-1823), 5C6F3 (SEQ ID NO:1816-1817 and 1818-1819), 25E6 (SEQ ID NO:1020-1021 and 1036-1037), 18G12, 28F9, 1E4, B12, B2, B7, B9, 8C7F3, or H11. In another aspect of the invention, a patient diagnosed with a MUC1* positive cancer is treated with an effective amount of human or humanized antibody or antibody fragment comprising sequences from MNE6 (SEQ ID NOS:56-57 and 107-108, or 341-342, or 391-392, or 393-394) or MNC2 (SEQ ID NO:144-145 and 194-195, or 654-655, or 239-249, or 5017-5020), 20A10 (SEQ ID NOS:1576-1581 or 5001-5012), 3C2B1 (SEQ ID NOS:1820-1823 or 1812-1813), 5C6F3 (SEQ ID NOS:1816-1819, or 1814-1815), 25E6 (SEQ ID NOS:1020-1021 and 1036-1037, or 1600-1601), 18G12, 28F9, 1E4, B12, B2, B7, B9, 8C7F3, or H11. In a preferred embodiment, a patient diagnosed with a MUC1* positive cancer is treated with an effective amount of humanized antibody or antibody fragment comprising sequences of MNC2 (SEQ ID NO:654-655), MNE6 (SEQ ID NO:341-342), 20A10 (SEQ ID NO:1580-1581), 3C2B1 (SEQ ID NO:1812-1813), 5C6F3 (SEQ ID NO:1814-1815), 25E6 (SEQ ID NO:1600-1601). In another aspect of the invention, a patient diagnosed with a MUC1* positive cancer is treated with an effective amount of humanized monovalent form of the antibodies such as MNC2 (SEQ ID NOS:239, 241, 243,396 or 5018-5020), MNE6 (SEQ ID NO:), 20A10 (SEQ ID NOS:1574-1581 or SEQ ID NOS:5001-5012), 3C2B1 (SEQ ID NO:1813), 5C6F3 (SEQ ID NO:1815), 25E6, 18G12, 28F9, 1E4, B12, B2, B7, B9, 8C7F3, or H11, wherein monovalent means the corresponding Fab fragment, the corresponding scFv or the corresponding scFv-Fc fusion. In a preferred embodiment, a patient diagnosed with a MUC1* positive cancer is treated with an effective amount of a humanized scFv or monomeric humanized scFv-Fc of MNC2, MNE6, 20A10, 3C2B1, 5C6F3, 25E6, 18G12, 28F9, 1E4, B12, B2, B7, B9, 8C7F3, or H11. Since the MUC1* growth factor receptor is activated by ligand induced dimerization of its extracellular domain, and because the Fc portion of an antibody homo-dimerizes, it is preferable that a construct that includes an Fc portion uses a mutated Fc region that prevents or minimizes dimerization.

[0612] Antibodies that bind to PSMGFR (SEQ ID NO:2) peptide, and more specifically to the N-10 peptide, of the extracellular domain of the MUC1* receptor are potent anti-cancer therapeutics that are effective for the treatment or prevention of MUC1* positive cancers. They have been shown to inhibit the binding of activating ligands dimeric NME1 (SEQ ID NO:1781) and NME7_{AB} (SEQ ID NOS:827) to the extracellular domain of MUC1*. Anti-MUC1* antibodies that bind to the PSMGFR sequence inhibit the growth of MUC1*-positive cancer cells, specifically if they inhibit ligand-induced receptor dimerization. Fabs of anti-MUC1* antibodies have been demonstrated to block tumor growth in animals. Thus, antibodies or antibody fragments that bind to the extracellular domain of MUC1* would be beneficial for the treatment of cancers wherein the cancerous tissues express MUC1*.

[0613] Antibodies that bind to PSMGFR region of MUC1* or bind to a synthetic PSMGFR peptide are preferred. Especially preferred are antibodies that bind to the N-10 peptide but not to the C-10 peptide. Still more preferred are antibodies that bind to the N-26 peptide wherein mutation or deletion of the PFPFS sequence (SEQ ID NO:1747) destroys binding of the antibody or fragment thereof to the N-26 peptide. We have identified several monoclonal antibodies that bind to the extracellular domain of MUC1*. Among this group are mouse monoclonal antibodies MNC2 (SEQ ID NOS:118-131, 144-158, 163-164, 168-181, 194-209), MNE6 (SEQ ID NOS:12-25, 39-59, 65-78, 93-114), 20A10 (SEQ ID NOS:988-1019, 1574-1597, 1659-1666); 3C2B1 (SEQ ID NOS:1386-1413, 1572-1573), 5C6F3 (SEQ ID NOS:1356-1385), 25E6 (SEQ ID NOS:1020-1051, 1598-1617, 1667-1674), 18G12 (SEQ ID NOS:956-987), 28F9 (SEQ ID NOS:1052-1083), 1E4 (SEQ ID NOS:1116-1227), B12 (SEQ ID NOS:1414-1431, 1733-1742), B2 (SEQ ID NOS:1432-1459), B7 (SEQ ID NOS:1460-1487), B9 SEQ ID NOS:1544-1571), 8C7F3 (SEQ ID NOS:1488-1515), or H11 (SEQ ID NOS:1516-1543), the variable regions of which were sequenced and are given as for MNE6 SEQ ID NOS: 12-13 and 65-66, for MNC2 SEQ ID NOS: 118-119 and 168-169. The CDRs of these antibodies make up the recognition units of the antibodies and are the most important parts of the mouse antibody that should be retained when grafting into a human antibody. The sequences of the CDRs for each mouse monoclonal are as follows, heavy chain sequence followed by light chain: MNE6 CDR1 (SEQ ID NO:16-17 and 69-70) CDR2 (SEQ ID NO:20-21 and 73-74) CDR3 (SEQ ID NO: 24-25 and 77-78), MNC2 CDR1 (SEQ ID NO:122-123 and 172-173) CDR2 (SEQ ID NO:126-127 and 176-177) CDR3 (SEQ ID NO:130-131 and 180-181), 20A10 CDR1 (SEQ ID NO:991-992 and 1008-1009) CDR2 (SEQ ID NO:996-997 and 1012-1013) CDR3 (SEQ ID NO:1000-1001 and 1016-1017), 3C2B1 CDR1 (SEQ ID NO:1388-1389 and 1402-1403) CDR2 (SEQ ID NO:1392-1393 and 1406-1407) CDR3 (SEQ ID NO:1396-1397 and 1410-1411), 5C6F3 CDR1 (SEQ ID NO:1358-1359 and 1372-1373) CDR2 (SEQ ID NO:1362-1363 and 1376-1377) CDR3 (SEQ ID NO:1366-1367 and 1380-1381), and 25E6 CDR1 (SEQ ID NO:1024-1025 and 1040-1041) CDR2 (SEQ ID NO:1028-1029 and 1044-1045) CDR3 (SEQ ID NO:1032-1033 and 1048-1049). In some cases, portions of the framework regions that by modeling are thought to be important for the 3-dimensional structure of the CDRs, are also imported from the mouse sequence.

[0614] Monoclonal antibodies MNE6, MNC2, 20A10, 3C2B1 and 25E6 have greater affinity for MUC1* as it appears on cancer cells. Monoclonal antibodies MNC3 and MNC8 have greater affinity for MUC1* as it appears on stem cells.

[0615] All seven antibodies have been humanized, which process has resulted in several humanized forms of each antibody. CDRs derived from the variable regions of the mouse antibodies were biochemically grafted into a homologous human antibody variable region sequence. Humanized variable regions of MNE6 (SEQ ID NOS: 38-39 and 93-94), MNC2 (SEQ ID NOS: 144-145 and 194-195), 20A10 (SEQ ID NOS:1576-1581 and 5001-5012), 3C2B1 (SEQ ID NOS:1812-1813), 5C6F3 (SEQ ID NOS: 1814-1815), 25E6 (SEQ ID NOS:1600-1601). MNC3 (SEQ ID NOS: 439-440 and 486-487) and MNC8 (SEQ ID NOS: 525-526 and 543-544) were generated by grafting the mouse CDRs into the variable region of a homologous human antibody. The humanized heavy chain variable constructs were then fused into constant regions of either human IgG1 heavy chain constant region (SEQ ID NOS:58-59) or human IgG2 heavy chain constant region (SEQ ID NO:54-55), which are then paired with either humanized light chain variable constructs fused to a human kappa chain (SEQ ID NO: 109-110) or human lambda chain (SEQ ID NO: 113-114) constant region. Other IgG isotypes could be used as constant region including IgG3 or IgG4.

[0616] Examples of humanized MNE6 variable region into an IgG2 heavy chain (SEQ ID NOS:52-53) and into an IgG1 heavy chain (SEQ ID NOS:56-57), humanized MNC2 variable into an IgG1 heavy chain (SEQ ID NOS: 157-158) or into an IgG2 heavy chain (SEQ ID NOS: 163-164) paired with either Lambda light chain (SEQ ID NO: 111-112 and 216-219) or Kappa chain (SEQ ID NO:107-108 and 210-213) and, humanized MNC3 (SEQ ID NOS: 455-456, 453-454 and 500-501, 502-503) and MNC8 (SEQ ID NOS: 541-542, 539-540 and 579-580, 581-582) antibodies were generated. Which IgG constant region is fused to the humanized variable region depends on the desired effect since each isotype has its own characteristic activity. The isotype of the human constant region is selected on the basis of things such as whether antibody dependent cell cytotoxicity (ADCC) or complement dependent cytotoxicity (CDC) is desired but can also depend on the yield of antibody that is generated in cell-based protein expression systems. In a preferred embodiment, humanized anti-MUC1* antibodies or antibody fragments are administered to a person diagnosed with or at risk of developing a MUC1-positive cancer.

[0617] One method for testing and selecting the humanized anti-MUC1* antibodies that would be most useful for the treatment of persons with cancer or at risk of developing cancers is to test them for their ability to inhibit the binding of activating ligands to the MUC1* extracellular domain. Dimeric NME1 can bind to and dimerize the MUC1* extracellular domain and in so doing stimulates cancer cell growth. Antibodies and antibody fragments that compete with NME1 for binding to the MUC1* extracellular domain are therefore anti-cancer agents. NME7A is another activating ligand of MUC1*. In some cases, it is preferable to identify antibodies that block the binding of NME7, or an NME7A truncation or cleavage product of NME7-X1, to the MUC1* extracellular domain. Antibodies and antibody fragments that compete with NME7 and NME7 variants for binding to the MUC1* extracellular domain are effective as anti-cancer therapeutics. These antibodies include but are not limited to MNC2, MNE6, 20A10, 3C2B1, 5C6F3, 25E6, 18G12, 28F9, 1E4, B12, B2, B7, B9, 8C7F3, or H11 as well as single chain versions, such as scFv, of these antibodies and humanized version thereof. Other NME proteins also bind to MUC1 or MUC1* including NME1, NME6 and NME8. Antibodies that compete with these proteins for binding to MUC1* may also be useful as therapeutics. In a preferred embodiment, murine, camelid, human or humanized anti-MUC1* antibodies or antibody fragments are administered to a person diagnosed with or at risk of developing a MUC1-positive cancer. In a more preferred embodiment, single chain antibody fragments, or monomeric scFv-Fc fusions, derived from humanized sequences of MNC2, MNE6, 20A10, 3C2B1, 5C6F3, 25E6, 18G12, 28F9, 1E4, B12, B2, B7, B9, 8C7F3, or H11 are administered to a person diagnosed with or at risk of developing a MUC1-positive cancer.

[0618] Single chain variable fragments, scFv, or other forms that result in a monovalent antibody or antibody-like protein are also useful. In some cases it is desired to prevent dimerization of the MUC1* extracellular domain. Single chain variable fragments, Fabs and other monovalent antibody-like proteins have been shown to be effective in binding to the extracellular domain of MUC1* and blocking MUC1* dimerization. These single chain variable fragments, Fabs and other monovalent antibody-like molecules effectively blocked cancer growth in vitro and in animals xenografted with human MUC1-positive cancer cells. Thus, humanized single chain variable fragments or monovalent anti-MUC1* antibodies or antibody-like molecules would be very effective as an anti-cancer therapeutic. Such humanized single chain antibodies, Fabs and other monovalent antibody-like molecules that bind to the MUC1* extracellular domain or to a PSMGFR peptide are therefore useful as anti-cancer therapeutics. Anti-MUC1* single chain variable fragments are generated by grafting non-human CDRs of antibodies, which bind to extracellular domain of MUC1* or bind to PSMGFR peptide, into a framework of a homologous variable region human antibody. The resultant humanized heavy and light chain variable regions are then connected to each other via a suitable linker, wherein the linker should be flexible and of length that it allows heavy chain binding to light chain but discourages heavy chain of one molecule binding to the light chain of another. For example a linker of about 10-15 residues. Preferably, the linker includes [(Glycine)₄ (Serine)₁]₃ (SEQ ID NOS: 401-402), but is not limited to this sequence as other sequences are possible.

[0619] In one aspect, the humanized variable regions of MNE6 (SEQ ID NOS: 38-39 and 93-94), MNC2 (SEQ ID NOS: 144-145 and 194-195), or other antibodies of the invention are biochemically grafted into a construct that connects heavy and light chains via a linker. Examples of humanized single chain anti-MUC1* antibodies comprising humanized sequences from the variable regions of MNE6 and MNC2, were generated. Several humanized MNE6 single chain proteins were generated (SEQ ID NOS: 232-237, 397-398). Several humanized MNC2 single chain proteins were generated (SEQ ID NOS: 238-243, 395-396, 654-655, 5017-5018, 5019-5020). Several humanized 20A10 single chain proteins were generated (SEQ ID NOS:1576-1581 and 5001-5012). Several humanized 3C2B1 single chain proteins were generated (SEQ ID NOS:1812-1813). Several humanized 5C6F3 single chain proteins were generated (SEQ ID NOS: 1814-1815). Several humanized 25E6 single chain proteins were generated (SEQ ID NOS:1600-1601). In a preferred embodiment, humanized anti-MUC1* antibody fragments, including variable fragments, scFv antibody fragments derived from MNE6 scFv, MNC2 scFv, 20A10, 3C2B1, 5C6F3, 25E6, 18G12, 28F9, 1E4, B12, B2, B7, B9, 8C7F3, or H11 scFv, which may be incorporated into different therapeutic formats including CARs, Bispecific antibodies, BiTEs, antibody drug conjugates, are administered to a person diagnosed with or at risk of developing a MUC1-positive cancer.

[0620] One aspect of the invention is a method for treating a patient diagnosed with, suspected of having, or at risk of developing a MUC1 positive or MUC1* positive cancer, wherein the patient is administered an effective amount of an agent containing a monomeric form of MNE6, MNC2, or 20A10, 3C2B1, 5C6F3, 25E6, 18G12, 28F9, 1E4, B12, B2, B7, B9, 8C7F3, or H11, wherein the antibody variable fragment portions are human or have been humanized and wherein the Fc portion of the antibody-like protein, if present, has been mutated such that it resists dimer formation.

### CAR T and Cancer Immunotherapy Techniques

[0621] In another aspect of the invention, some or all of the single chain portions of anti-MUC1* antibody fragments are biochemically fused onto immune system molecules, using several different chimeric antigen receptor, ‘CAR’ strategies. The idea is to fuse the recognition portion of an antibody, typically as a single chain variable fragment, to an immune system molecule that has a transmembrane domain and a cytoplasmic tail that is able to transmit signals that activate the immune system for example activating the immune cell to kill the cell that is recognized by the recognition unit. The recognition unit can be an antibody fragment, a single chain variable fragment, scFv, or a peptide. In one aspect, the recognition portion of the extracellular domain of the CAR is comprised of sequences from the human, humanized or non-human variable regions of MNE6 (SEQ ID NOS:12-13 and 65-66, 56-57 and 107-108, 38-39 and 93-94, 341-342, 391-394), MNC2 (SEQ ID NOS:118-119 and 168-169, or 144-145 and 194-195, 654-655, 239-243, or 5017-5020), 20A10 (SEQ ID NOS:988-989 and 1004-1005, or 1574-1581, 1677, 1687 or 5001-5012), 3C2B1 (SEQ ID NOS:1386-1413, or 1820-1823, 1572-1573, or 1812-1813), 5C6F3 (SEQ ID NOS:1816-1819, or 1384-1385, or 1814-1815), 25E6 (SEQ ID NOS:1020-1021, or 1036-1037, or 1598-1601), 18G12, 28F9, 1E4, B12, B2, B7, B9, 8C7F3, or H11. These are examples of murine or humanized antibodies of the invention, or their single chain fragments, scFv's, which can be incorporated into CARs, BiTEs or ADCs. In another aspect, the recognition unit is comprised of sequences from a single chain variable fragment. Examples of single chain constructs are given. Several humanized MNE6 single chain proteins, scFv, were generated (SEQ ID NOS: 232-237). Several humanized MNC2 single chain proteins, scFv, were generated (SEQ ID NOS: 238-243, 654-655, or 5017-5020). Several humanized 20A10 single chain proteins, scFv, were generated (SEQ ID NOS:1576-1581, 1677, 1687 and 5001-5012). Humanized single chain proteins were also derived from 3C2B1 (SEQ ID NOS:1812-1813), 5C6F3 (SEQ ID NOS:1814-1815) and 25E6 (SEQ ID NOS:1600-1601). The extracellular hinge of the CAR can be derived from a variety of proteins, including CD8 (SEQ ID NOS:345-346), CD4 (SEQ ID NOS:347-348) or CD28 (SEQ ID NOS:349-350). The transmembrane region of the CAR can also be derived from CD3-zeta (SEQ ID NOS:361-362), CD8 (SEQ ID NOS:363-364), CD4 (SEQ ID NOS:365-366), CD28 (SEQ ID NOS:367-368), 4-1BB (SEQ ID NOS:369-370), OX40 (SEQ ID NOS:371-372), antibody domains or other transmembrane region, including the transmembrane region of the proximal cytoplasmic co-stimulatory domain, such as CD28, 4-1BB or other. The cytoplasmic tail of the CAR can be comprised of one or more motifs that signal immune system activation. A group of cytoplasmic signaling motifs, sometimes referred to as co-stimulatory domains, includes but is not limited to CD27, CD28 (SEQ ID NOS:377-378), 4-1BB (SEQ ID NOS:379-380), OX40, CD30, CD40, ICAm-1, LFA-1, ICOS, CD2, CD5, CD7 and Fc receptor gamma domain. The signaling domain can be CD3-zeta (SEQ ID NOS:373-374, or 375-376) or a modified CD3-zeta called 1XX (SEQ ID NOS:1796-1797). A minimal CAR may have the CD3-zeta or an Fc receptor gamma domain then one or two of the above domains in tandem on the cytoplasmic tail. In one aspect, the cytoplasmic tail comprises CD3-zeta, or a mutant thereof such as 1XX, plus a co-stimulatory domain such as CD28, 4-1BB and/or OX40. In another aspect, one or two ITAMs of CD3-zeta are deleted or mutated to slow signaling which increases persistence and decreases differentiation of the immune cell.

[0622] The extracellular domain recognition unit of a MUC1* targeting CAR can comprise variable regions of any non-human, humanized or human antibody that is able to bind to at least 12 contiguous amino acids of the PSMGFR peptide (SEQ ID NO:2) or more preferably the N-10 peptide (SEQ ID NO:3), still more preferably, is able to bind to the N-10 peptide (SEQ ID NO:3), but is not able to bind to the C-10 peptide (SEQ ID NO:825). In one aspect, the MUC1* targeting portion of the CAR comprises variable regions from non-human, humanized or human MNC2, MNE6, 20A10, 3C2B1, 5C6F3, 25E6, 18G12, 28F9, 1E4, B12, B2, B7, B9, 8C7F3, or H11. In a preferred embodiment, the MUC1* targeting portion of the CAR comprises variable regions from non-human, humanized or human MNC2, MNE6, 20A10, 3C2B1, 5C6F3, 25E6. Examples of a few antibodies of the invention, incorporated into CARs as either murine or humanized are given as MNE6 (SEQ ID NOS:297-298, 300-301, 303-304, 1626-1633 and 5045-5048), MNC2 (SEQ ID NOS:306-307, 608-611, 718-719, 1618-1625, 5041-5044, and 1784-1785), 20A10 (SEQ ID NOS:1582-1597, 5021-5028, 1798-1799, 1692,1699, and 1706), and 25E6 (SEQ ID NOS:1602-1617, 5033-5040). Similarly, single chain antibodies derived from 3C2B1 (SEQ ID NOS:1572-1573 or 1812-1813) or 5C6F3 (SEQ ID NOS:1384-1385 or 1814-1815) can be substituted for the single chain antibody fragment in any of the CARs listed above. In the humanization process, the antibody CDRs can be inserted into a number of different framework regions; as a demonstration we generated three versions of a humanized 20A10 which differ only in the framework regions. These have been incorporated into CARs (SEQ ID NOS:1675, 1678, 1685) that when transduced into human T cells are able to recognize target MUC1* expressing cells and kill them. In one aspect, the extracellular domain recognition unit of a CAR is comprised essentially of a humanized MNC2, MNE6, 20A10, 3C2B1, 5C6F3, 25E6, 18G12, 28F9, 1E4, B12, B2, B7, B9, 8C7F3, or H11 single chain variable fragment scFv. The recognition domain, which is typically an antibody fragment, can be fused to an extracellular region, often referred to as the hinge. The hinge can be derived from a variety of extracellular regions or peptides, including but not limited to the hinge region of CD8 (SEQ ID NOS:345-346), CD4 (SEQ ID NOS:347-348) or CD28 (SEQ ID NOS:349-350). The transmembrane region of the CAR can be derived from a number of protein transmembrane domains, including but not limited to CD8 (SEQ ID NOS:363-364), or can be the transmembrane domain of CD3-zeta (SEQ ID NOS:361-362), CD4 (SEQ ID NOS:365-366), CD28 (SEQ ID NOS:367-368), 41BB (SEQ ID NOS:369-370), OX40 (SEQ ID NOS:371-372) or other transmembrane region. The cytoplasmic domain of a CAR with antibody fragment targeting MUC1* extracellular domain can be comprised of one or more selected from the group comprising an immune system co-stimulatory cytoplasmic domain and a cytoplasmic signaling domain. The group of immune system co-stimulatory domains includes but is not limited to CD27, CD28, 4-1BB, OX40, CD30, CD40, ICAm-1, LFA-1, ICOS, CD2, CD5, CD7 and Fc receptor gamma domain (SEQ ID NOS:373-382). The group of immune system signaling domains includes but is not limited to CD3-zeta (SEQ ID NOS:373-376) and CD3-zeta-1XX (SEQ ID NOS:1796-1797). The CD3-zeta signaling domain may be wild type or may contain deletions or mutations of one or two of the three ITAMs. In one aspect, the CD3-zeta domain contains only one functional ITAM. In a preferred embodiment that ITAM is ITAM1 also known as the 1XX variation of CD3-zeta.

[0623] The CARs described can be transfected or transduced into a cell of the immune system. In a preferred embodiment, a MUC1* targeting CAR is transfected or transduced into a T cell or an NK cell. The immune cell can be autologous or allogeneic. In one aspect, the T cell is a CD3+ T cell, which may be CD8 or CD4 positive. In another case it is a dendritic cell. In another case it is a B cell. In another case it is a mast cell. In yet another case it is a Natural Killer, NK, cell. In another aspect, the immune cell is derived from a stem cell that has been directed to differentiate to that immune cell type in vitro. In another aspect, a CAR containing sequences of the antibody are expressed in a stem cell, which then may be differentiated into an immune cell. In one case, the immune cell is a T cell. In another case, the immune cell is an NK cell. The cell can be from a patient or from a donor. If from a donor, it can be engineered to remove molecules that would trigger rejection. Cells transfected or transduced with a CAR of the invention can be expanded ex vivo or in vitro then administered to a patient. Administrative routes are chosen from a group containing but not limited to bone marrow transplant, intravenous injection, in situ injection or transplant. In a preferred embodiment, the MUC1* targeting CAR is administered to a person diagnosed with or at risk of developing a MUC1-positive cancer.

[0624] There are many possible anti-MUC1* CAR constructs that can be transduced into T cells or other immune cells for the treatment or prevention of MUC1* positive cancers. CARs are made up of modules and the identity of some of the modules is relatively unimportant, while the identity of other modules is critically important. We and others have shown that intracellular signaling modules, such as CD3-zeta (SEQ ID NOS: 373-376), CD28 (SEQ ID NOS: 377-378) and 41BB (SEQ ID NOS: 379-380), alone or in combinations stimulate immune cell expansion, cytokine secretion and immune cell mediated killing of the targeted tumor cells (Pule M A, Straathof K C, Dotti G, Heslop H E, Rooney C M and Brenner M K (2005) A chimeric T cell antigen receptor that augments cytokine release and supports clonal expansion of primary human T cells. Mol Ther. 12(5):933-941; Hombach A A, Heiders J, Foppe M, Chmielewski M and Abken H. (2012) OX40 costimulation by a chimeric antigen receptor abrogates CD28 and IL-2 induced IL-10 secretion by redirected CD4(+) T cells. Oncoimmunology. 1(4):458-466; Kowolik C M, Topp M S, Gonzalez S, Pfeiffer T, Olivares S, Gonzalez N, Smith D D, Forman S J, Jensen M C and Cooper U. (2006) CD28 costimulation provided through a CD19-specific chimeric antigen receptor enhances in vivo persistence and antitumor efficacy of adoptively transferred T cells. Cancer Res. 66(22):10995-11004; Loskog A, Giandomenico V, Rossig C, Pule M, Dotti G and Brenner MK. (2006) Addition of the CD28 signaling domain to chimeric T cell receptors enhances chimeric T cell resistance to T regulatory cells. Leukemia. 20(10):1819-1828; Milone M C, Fish J D, Carpenito C, Carroll R G, Binder G K, Teachey D, Samanta M, Lakhal M, Gloss B, Danet-Desnoyers G, Campana D, Riley J L, Grupp S A and June C H. (2009) Chimeric receptors containing CD137 signal transduction domains mediate enhanced survival of T cells and increased antileukemic efficacy in vivo. Mol Ther. 17(8):1453-1464; Song D G, Ye Q, Carpenito C, Poussin M, Wang L P, Ji C, Figini M, June C H, Coukos G, Powell D J Jr. (2011) In vivo persistence, tumor localization, and antitumor activity of CAR-engineered T cells is enhanced by costimulatory signaling through CD137 (4-1BB). Cancer Res. 71(13):4617-4627). Antibodies of the invention including but not limited to fragments of MNC2, MNE6, 20A10, 3C2B1, 5C6F3, 25E6, 18G12, 28F9, 1E4, B12, B2, B7, B9, 8C7F3, or H11 can also be incorporated into CARs that have mutated cytoplasmic tails, such as mutated or deleted tyrosines of one or more of the ITAMs. In any of the CARs described above, the cytoplasmic tails may include mutations or deletions that dampen signaling, which increases persistence and decreases host cell differentiation. Such mutations include but are not limited to Tyrosines that are mutated to inhibit phosphorylation and signaling (Salter et al, 2018;). In any of the CARs described above, the ITAMs of CD3-zeta may be mutated to inhibit or dampen signaling (Feucht et al 2019). In any of the CARs described above, the CD3-zeta of the cytoplasmic tail may comprise mutations or deletions in the ITAMs including those referred to as 1XX (SEQ ID NOS:1796-1797). In another aspect one or two ITAMs are deleted, leaving only one or two ITAMs (Feucht et al 2019). In another aspect, the position of the included ITAM or ITAMs is moved to a position proximal to the co-stimulatory domain. Suitable ITAM configurations for increased persistence of CARs include but are not limited to 1XX, X2X, XX3, 12X and 23X, wherein the numeral 1, 2 or 3 refers to ITAM1, ITAM2, or ITAM3 and X refers to the deletion of that ITAM. In a preferred embodiment ITAM1 is the only functional ITAM included in the CAR construct, also known as 1XX. Examples of antibodies of the invention incorporated into CARs with 1XX mutations in ITAMs of CD3-zeta are given in the following sequences: MNC2 (SEQ ID NOS: 1618-1625, 5041-5044 and 1784-1785), MNE6 (SEQ ID NOS:1626-1633 and 5045-5048), 20A10 (SEQ ID NOS:1590-1597, 5021-5028, and 1798-1799), 25E6 (SEQ ID NOS:1610-1617 and 5037-5040). The transmembrane and extracellular hinge region of the CAR may or may not be derived from sequences of the adjacent co-stimulatory domain. For example, a CAR comprising the 4-1BB co-stimulatory domain may have a transmembrane and hinge region derived from CD8 or CD28. In another example, a CAR comprising the CD28 co-stimulatory domain may have a transmembrane and hinge region derived from CD28. Examples of antibodies of the invention incorporated into CARs with 1XX mutations in ITAMs of CD3-zeta, which have a CD28 co-stimulatory domain as well as transmembrane and hinge region derived from CD28, are given in the following sequences: MNC2 (SEQ ID NOS:5041-5044 and 1784-1785) MNE6 (SEQ ID NOS:5045-5048), 20A10 (SEQ ID NOS:5025-5028, 1798-1799, 1692,1699, and 1706); 25E6 (SEQ ID NOS:5037-5040). In any of the CARs described here, the cytoplasmic region may be comprised of one or more of signaling sequence motifs and co-stimulatory domains, including but not limited to CD3-zeta, CD3-zeta-1XX, CD27, CD28, 4-1BB, OX40, CD30, CD40, ICAm-1, LFA-1, ICOS, CD2, CD5, or CD7. Additionally, the sequence of the intracellular signaling domain may contain mutations, such as CD3-zeta-1XX (SEQ ID NOS:1796-1797) that dampen the signal to improve persistence or target cell killing. Signaling domain CD3-zeta may be wild type or may contain mutations or deletions of one or two ITAMs. In a preferred embodiment, ITAMs 2 and 3 are deleted or inactivated, leaving a single ITAM, which is ITAM1 also known as the 1XX construct.

[0625] In one aspect of the invention, the hinge and transmembrane regions of CAR are derived from CD8 (SEQ ID NO: 301, 719, 1675 or 1605). In another aspect of the invention, the hinge and transmembrane regions of CAR are derived from CD28 (SEQ ID NO:5048, 5044, 5024 or 5036). In one aspect of the invention, the co-stimulatory domain is CD28 (SEQ ID NO: 298, 609, 1589, 1609). In another aspect of the invention, the co-stimulatory domain is 4-1BB (SEQ ID NO: 301, 719, 1585 or 1605). In a preferred embodiment, the antibody fragment that is the targeting head of the CAR, binds to the extracellular domain of a MUC1 that is devoid of the tandem repeat domain. In a more preferred embodiment, the antibody fragment that is the targeting head of the CAR, binds to a region of the MUC1* extracellular domain that contains the 35 most membrane proximal amino acids, also referred to here as N-10 (SEQ ID NO:3). In a still more preferred embodiment, the antibody fragment that is the targeting head of the CAR, binds to N-10 (SEQ ID NO:3) but does not bind to C-10 (SEQ ID NO:825). In a yet more preferred embodiment, the antibody fragment that is the targeting head of the CAR, binds to N-10 (SEQ ID NO:3), does not bind to C-10 (SEQ ID NO:825) and either does not bind to a linear epitope, that is to say doesn't work in a standard Western blot, or competes with NME7_{AB} for binding to the N-10 peptide (SEQ ID NO:3). In the CARs described here, the extracellular domain may include a murine, camelid, human, non-human or humanized single chain antibody fragment with framework region IV of the light chain having variable lengths as set forth as MNE6 scFv (SEQ ID NOS:5014 or 5016), MNC2 scFv (SEQ ID NOS:5018 or 5020) or 20A10 scFv (SEQ ID NOS 5002, 5004, 5006, 5008, 5010 or 5012), 25E6 scFv (SEQ ID NOS: 5030 or 5032). In any of the CARs described above, the Framework region IV of the light chain of the single chain antibody fragment may have the terminal amino acids R and T deleted or just T deleted. We note that the CDRs of antibodies can be inserted into a background of a number of different framework regions. As an example, 20A10 CDRs were inserted into three different sets of framework regions (SEQ ID NOS:1692, 1699 and 1706) and all were able to function when transduced into T cells. In any of the CARs described above, the T cell may be engineered to overexpress c-Jun as a method to inhibit T cell exhaustion (Lynn et al 2019). A variety of promoters can be used upstream of the genes for CARs and other compositions of the invention, including insertion into a naturally occurring promoter in the cell, such as the TRAC locus, using CRISPR, Sleeping Beauty or similar technology for site directed insertion of a gene. Among the promoters commonly used are the CMV promoter, or a mini CMV (SEQ ID NO: 1634), a minimal IL-2 promoter (SEQ ID NO: 1635), or Minimal Promoter minip (SEQ ID NO: 1636).

[0626] Single chain antibody fragments that included the variable domain of the monoclonal anti-MUC1* antibodies called MNE6 or MNC2 were engineered into a panel of CARs. The MUC1* targeting CARs were then transduced, separately or in combinations, into immune cells. When challenged with surfaces presenting a MUC1* peptide, an antigen presenting cell transfected with MUC1*, or MUC1* positive cancer cells, the immune cells that were transduced with MUC1* targeting CARs elicited immune responses, including cytokine release, killing of the targeted cells and expansion of the immune cells.

[0627] For example, the gene encoding the CARs and activated T cell induced genes described herein can be virally transduced into an immune cell using viruses, or inserted into a region downstream of one of the cell's promoters or enhancers, such as the TRAC (T cell receptor alpha chain) locus. Virus delivery systems and viral vectors including but not limited to retroviruses, including gamma-retroviruses, lentivirus, adenoviruses, adeno-associated viruses, baculoviruses, poxvirus, herpes simplex viruses, oncolytic viruses, HF10, T-Vec and the like can be used. In addition to viral transduction, CARs and activated T cell induced genes described herein can be directly spliced into the genome of the recipient cell using methods such as CRISPR technology, CRISPR-Cas9 and -CPF1, TALEN, Sleeping Beauty transposon system, and SB 100×.

[0628] Similarly, the identity of molecules that make up the non-targeting portions of the CAR, except for the CD3-zeta identity, such as the extracellular domain, transmembrane domain and membrane proximal portion of the cytoplasmic domain, are not essential to the function of a MUC1*-targeting CAR. For example, the extracellular domain, transmembrane domain and membrane proximal portion of the cytoplasmic domain can be comprised of portions of CD8, CD4, CD28, or generic antibody domains such as Fc, CH2CH3, or CH3. Further, the non-targeting portions of a CAR can be a composite of portions of one or more of these molecules or other family members. However, the identity of CD3-zeta is critical, as mutations, such as those referred to as 1XX or CD3-zeta-1XX, greatly affect in vivo persistence of CAR T cells. CAR T cells that express CARs whose cytoplasmic tail includes CD3-zeta-1XX have prolonged activity in vivo because they do not get exhausted as quickly as cells containing wild-type CD3-zeta. In addition, we have discovered that CARs with the 1XX signaling domain are more effective against cells characterized by low antigen density. Cancer cells with low antigen density may comprise a sub-population of a heterogeneous tumor. Cancer cells with low antigen density may be characteristic of early cancer cells that can lead to cancer recurrence. Additionally, tumors at the time of treatment may be comprised of cancer cells that express low levels of a particular cancer antigen.

[0629] Thus, in one embodiment, patients diagnosed with a cancer or at risk of developing a cancer or a cancer recurrence are treated with immune cells that express a CAR comprising a 1XX signaling domain. In one aspect, the patient is diagnosed with or at risk of developing a MUC1* cancer. In a preferred embodiment the recognition unit of the CAR comprises an antibody fragment that binds to the N-10 peptide (SEQ ID NO:3) but does not bind to the C-10 peptide (SEQ ID NO:825). In a more preferred embodiment, the antibody fragment is derived from MNC2, MNE6, 20A10, 3C2B1, 5C6F3, or 25E6.

[0630] In another embodiment, a patient diagnosed with a cancer comprised of tumor cells that express low levels of a targeted antigen, or diagnosed with an early cancer, or a patient who has been treated but still has residual tumor cells and is at risk of a cancer recurrence is treated with immune cells that express a CAR comprising a 1XX signaling domain, which enables the CAR T cells to kill both high and low antigen density cancer cells. In one aspect, the patient is diagnosed with or at risk of developing a MUC1* cancer. In a preferred embodiment the recognition unit of the CAR comprises an antibody fragment that binds to the N-10 peptide (SEQ ID NO:3) but does not bind to the C-10 peptide (SEQ ID NO:825). In a more preferred embodiment, the antibody fragment is derived from MNC2, MNE6, 20A10, 3C2B1, 5C6F3, or 25E6.

[0631] In yet another aspect of the invention, a patient diagnosed with a cancer or at risk of developing a cancer or a cancer recurrence is treated with an immune cell expressing a CAR with a wild-type CD3-zeta and is also treated with an immune cell expressing a CAR with a mutated CD3-zeta, such as CD3-zeta-1XX. In this way, the tumor is attacked by an immune cell expressing a CAR with full CD3-zeta signaling that efficiently kills off the high antigen expressing cells, but which are prematurely exhausted, while the cells expressing a CAR with a mutated CD3-zeta, such as CD3-zeta-1XX, persist longer in the patient and kill of the low antigen expressing cells that likely give rise to tumor recurrence. In one aspect, the patient is diagnosed with or at risk of developing a MUC1* cancer. In a preferred embodiment the recognition unit of the CAR comprises an antibody fragment that binds to the N-10 peptide (SEQ ID NO:3) but does not bind to the C-10 peptide (SEQ ID NO:825). In a more preferred embodiment, the antibody fragment is derived from MNC2, MNE6, 20A10, 3C2B1, 5C6F3, or 25E6. In one aspect, a patient is treated with a CAR T cell in which the CAR has a wild type CD3-zeta signaling domain, wherein the CAR is chosen from among the group comprising MNC2 CARs (SEQ ID NO:306-307, 608-611, 718-719), MNE6 CARs (SEQ ID NO:297-298, 300-301, 303-304), 20A10 CARs (SEQ ID NO:1582-1589, 5021-5024), 25E6 CARs (1602-1609, 5033-5036), a CAR comprising an antibody fragment derived from 3C2B1 wherein the signaling domain is wild type CD3-zeta, and a CAR comprising an antibody fragment derived from 5C6F3 wherein the signaling domain is wild type CD3-zeta. In another aspect, a patient is treated with a CAR T cell in which the CAR has a CD3-zeta-1XX signaling domain, wherein the CAR is chosen from among the group comprising MNC2 CARs (SEQ ID NO:1618-1625, 5041-5044, 1784-1785), MNE6 CARs (SEQ ID NO:1626-1633, 5045-5048), 20A10 CARs (SEQ ID NO:1590-1597, 5025-5028, 1798-1799), 25E6 CARs (SEQ ID NOS:1610-1617, 5037-5040), a CAR comprising an antibody fragment derived from 3C2B1 wherein the signaling domain is CD3-zeta-1XX, and a CAR comprising an antibody fragment derived from 5C6F3 wherein the signaling domain is CD3-zeta-1XX. In yet another aspect, a patient is treated with immune cells that express both a CAR having a wild type CD3-zeta signaling domain and a CAR having a 1XX signaling domain.

[0632] We have shown that CAR T cells bearing the 1XX mutations in the CD3-zeta are more effective than CAR T cells with wild type CD3-zeta at preventing tumor recurrence. FIG. 218 shows graphs of tumor volume measured by an IVIS instrument wherein the tumor cells have been genetically modified to express Luciferase. The substrate Luciferin was injected 10 minutes before the photo emissions were measured in the sedated animal. On Day 1 of the experiment, animals were injected sub-cutaneously with 250,000 human breast tumor cells. Tumors were made heterogeneous, comprised of two different tumor cell types. A first tumor cell population was T47D-wt, a breast cancer cell line that expresses both full-length MUC1 and the growth factor receptor form MUC1*, which we engineered to express mCherry fluorescence. The second tumor cell population was the same T47D breast cancer cells, except that they had been stably transduced to express even more MUC1* and GFP fluorescence, referred to here as T47D-MUC1*. In this experiment, animals were implanted with T47D-wt plus T47D-MUC1*, wherein the population of T47D-MUC1* made up 30%, 15% or 7.5% of the tumor population. Animals were then administered a one-time injection of either PBS, huMNC2-41BB-3z CAR T cells (4-1BB), huMNC2-CD28-3z CAR T cells (CD28) or huMNC2-CD28-1XX CAR T cells (CD28-1XX or 1XX). The CAR T cells were injected into the tail vein at an Effector to Target ratio (E:T) of 10:1, 5:1, or 1:1. As can be seen in these graphs, huMNC2-CD28-1XX out-performs huMNC2-CD28-3z and huMNC2-41BB-3z and the difference is more pronounced in tumors with low antigen density and when treatment is at a low CAR T cell dose. In follow-on experiments described here, it is clear that 1XX CAR T cells not only persist longer in vivo and stave off T cell exhaustion, but they also are much more effective at killing low antigen density tumor cells, which is a recognized problem in the industry and will lead to cancer recurrence. FIG. 219A-219B shows IVIS photographs and graphs of IVIS tumor volume measurement. FIG. 219A shows photographs of the mice that had been implanted with tumors in which 30% of the cancer cell population was T47D-MUC1*, referred to here as high antigen expressing cells. The various CAR T cells were administered at a CAR T to tumor cell ratio of 10:1 wherein 250,000 tumor cells were implanted and the animals were injected 5 days later with 2,500,000 CAR T cells. FIG. 219B shows a graph of the tumor volume by IVIS measurement by day. As can be seen, animals injected with the huMNC2-CD28-1XX had much smaller tumors than the animals treated huMNC2-4-1BB-3z or huMNC2-CD28-3z, which is the same CAR T except without the 1XX mutations in the CD3-zeta domain. FIGS. 220A-220T shows the IVIS graphs for 30% tumors treated at a CAR T to Tumor ratio of 10:1. Here graphs are shown for each individual animal rather than the average of the treatment group. FIGS. 221A-221B and FIGS. 222A-222T show essentially the same experiment except that the CAR T cell dose is lower with only 250,000 CAR T cells administered in a single injection. As can be seen, animals injected with the huMNC2-CD28-1XX had much smaller tumors than the animals treated huMNC2-4-1BB-3z or huMNC2-CD28-3z, which is the same CAR T except without the 1XX mutations in the CD3-zeta domain. However, with the lower dose of CAR T cells, even tumors in the huMNC2-CD28-1XX treated group begin to grow again, albeit more slowly.

[0633] In these next experiments (FIG. 223-FIG. 226) we show that in animals implanted with tumors in which only 7.5% of the tumor expresses high antigen density, it is even harder for standard CAR T cells to kill of the tumor. However, the same CAR T cells with the 1XX mutations in CD3-zeta are still quite effective at killing the tumor and inhibiting tumor recurrence. At a moderate CAR T cell dose having an effector to target ratio of 10:1, huMNC2-41BB-3z and huMNC2-CD28-3z show some long-term killing, which is exceeded by huMNC2-CD28-1XX. However, with low antigen density, which is a mimic of early cancer cells and residual, resistant cancer cells, and a low CAR T cell dose, having an effector to target ratio of 1:1, huMNC2-41BB-3z and huMNC2-CD28-3z did no better than the control PBS, whereas huMNC2-CD28-1XX continued to kill the tumor.

[0634] Animals were sacrificed between Day 69 and Day 90. FIGS. 227-233 show the tabulation of CD3 positive human T cells that were harvested from the spleens and from the blood of the test animals post sacrifice. As can be seen, the huMNC2-CD28-1XX treated mice, that had smaller tumors, have a greater number of live, persisting CAR T cells and CD8 positive killer T cells than the animals treated with the CAR T cells with wild type CD3-zeta. It is also seen that the molecular markers of T cell exhaustion, TIM3, LAG3 and PD-1, are greatly reduced or absent in the cells retrieved from the animals treated with huMNC2-CD28-1XX CAR T cells. This result is consistent with the idea that the 1XX mutations in CD3-zeta increase CAR T cell persistence in vivo.

[0635] After sacrifice, the tumors were excised and analyzed as well. Excised tumors were photographed and weighed (FIG. 234, FIG. 236, FIG. 238, FIG. 240) weights were recorded. Tumors were then enzymatically dissociated and fluorescent photographs were taken to characterize and quantify the cells that caused the tumor recurrence. Recall that tumors were a heterogeneous population of high antigen expressing cells that were GFP positive and low antigen density cells that were mCherry positive. Red and green fluorescent photographs of the residual tumors show that when tumors have a high percentage of high antigen density cells and a high CAR T cell dose, the all the CAR T cells were able to kill the tumor cells that expressed high levels of the target antigen. However, tumor recurrence was mainly due to the growth of the low antigen density cells that standard CAR T cells do not kill as readily. When tumors were made up of a low percentage of high antigen cells and the CAR T cell dose was low, standard CAR T cells did no better than the control injection of PBS. However, the CAR T cells with the 1XX mutations in the CD3-zeta domain killed the low antigen density cells considerably better which greatly inhibited tumor recurrence (FIG. 235, FIG. 237, FIG. 239, FIG. 241).

[0636] FIG. 242 shows photographs of live animals fluorescently imaged. Fluorescent photographs taken at two different timepoints showed that for animals implanted with a moderate percentage of high antigen cells and treated with a CAR with wild type CD3-zeta or a CAR with 1XX mutations, the growth rate of low antigen density cells was faster in the animals treated with the CAR with wild type CD3-zeta compared to animals treated with the CAR with the CD3-1XX. At low CAR T cell dose, the standard CARs showed a faster growth rate o both low and high antigen density tumor cells. This is consistent with the idea that a CAR with a wild type CD3-zeta is not as efficient as CARs with 1XX at killing low antigen density cells and that with a lower number of CAR T cells, the standard CARs get exhausted faster than CARs with the 1XX mutations in CD3-zeta (FIG. 242, FIG. 243, FIG. 244, FIG. 245.

[0637] In another experiment, we injected mice at Day 52 with either 250,000 high antigen density tumor cells or 2,500,000 more CAR T cells. As can be seen in FIG. 246 and FIG. 247, the injection of additional tumor cells does not increase the tumor growth in animals treated with huMNC2-CD28-1XX CAR T cells. However, the injection of additional tumor cells does increase tumor growth in animals treated with huMNC2-CD28-3z or huMNC2-41BB-3z CAR T cells. This result is consistent with CAR T cells with 1XX mutations in CD3z prolong CAR T cell persistence in vivo. It can also be seen that the injection of additional CAR T cells suppressed tumor cells in some of the animals in all groups. This is consistent with the idea that tumor recurrence was not due to tumor escape because the fresh CAR T cells still recognized the tumor cells and killed them.

[0638] A significant problem for the treatment of cancers are the tumor cells that express low levels of tumor-associated antigen, especially with regard to cellular therapies where, to date, the killing of tumor cells has been dependent on the antigen density of the tumor cells. Tumor cells expressing low levels of the target antigen escape CAR T cells as well as engineered CAR NK cells. Essentially all solid tumors are heterogeneous and comprised of cells that express different levels of the target antigen. To further study this problem and to develop therapeutics that are able to detect and kill tumor cells expressing low levels of the target antigen, we devised a strategy for making heterogeneous tumors made up of both high and low antigen expressing cells, wherein the two different cell types bear fluorescent labels that can be detected in vivo as well as ex-vivo after sacrifice of the test animals (See FIG. 248-FIG. 256). As can be seen in the IVIS graphs of FIG. 249 and FIG. 250, CARs with standard CD3z signaling domains or with 1XX mutations kill tumor cells expressing high levels of antigen when treated with high, 10:1, dose of CAR T cells. However, for CARs with standard CD3-z domains, the difference between treated and untreated wanes for animals implanted with tumor cells expressing low percentage of high antigen expressing cells, even when the dose of CAR T cells is high. This result argues that CARs with mutated CD3-z signaling domain, like 1XX, have enhanced ability to detect tumor cells that express low percentages of high antigen expressing cells. FIG. 251 shows that in animals that were implanted with 250,000 tumor cells, then treated once with either 2.5M CAR T cells or 250,000 CAR T cells, tumors recur and the timing and degree of recurrence is greater in animals treated with CARs bearing standard CD3z than in animals bearing CD3z with 1XX mutations. The excised tumors were fluorescently photographed at mCherry wavelength and at GFP wavelength. As can be seen in FIG. 252 tumor recurrence is minimal for the tumors of animals treated with huMNC2-CD28-1XX. Further, the figure shows that tumor recurrence is dominated by the low antigen expressing cells that are missed by the standard CAR T cells. As can be seen in FIG. 253 and FIG. 256, when tumors expressing low percentage of high antigen expressing cells are coupled with treating with low dose CAR T cells, a combination of CAR T cell exhaustion plus escape of low antigen cells drives tumor resistance. We note that for the tumors labeled 15% high antigen density, flow cytometry showed that a population of tumor cell clusters was present, which has been reported to result in a greater rate of tumor growth in vivo.

[0639] Anti-MUC1* CAR T cells persist longer and stave off T cell exhaustion when the CD3-zeta signaling domain is mutated to slow signaling as in mutating some of the Tyrosines, for example as we have done with the huMNC2-CD28-1XX, see Tables in FIG. 257-FIG. 282. Excised tumors from the test animals were analyzed by flow cytometry for the presence of human CAR T cells and their expression of exhaustion markers. It is notable that even in a high antigen density tumor, such as 30% of the cells express high levels of the antigen, in this case MUC1*, wherein animals were treated with a high effector to target ratio of 10:1 CAR T cells to tumor cells, there is a significantly higher number of CAR T cells in the tumors of mice treated with the anti-MUC1* CAR T with CD3z mutations, in this case 1XX. As can be seen in the Table of FIG. 257, the mice treated with huMNC2-CD28-1XX had an average of 1,516 CAR T cells in the excised tumor, compared to only 196 CAR T cells for the huMNC2-41BB-3z and 395 CAR T cells for the huMNC2-CD28-3z treated mice. In the huMNC2-CD28-1XX treated mice, the CAR T cells expressed the lowest percentages of exhaustion markers. That means that for tumors with a significant amount of high antigen expressing cells and at high dose of CAR T cells, the mutated CD3z, as in 1XX mutations, gives the CAR T cells an advantage in terms of being able to recognize tumor cells and also being able to stave off exhaustion. Comparison of CAR T cell persistence among CARs, with or without mutated CD3z, is assessed by looking at these same 30% high antigen expressing tumors, but wherein animals were treated with a low dose of CAR T cells: 250,000 CAR T cells and 250,000 tumor cells, i.e. 1:1 ratio. The Table of FIG. 262 shows that CARs with a standard CD3z signaling domain, administered to animals at low dose have almost no measurable CAR T cells in their tumors after about 70-90 days after CAR T cell injection. These data argue that at low CAR T dose, the CAR T cells need to work harder and get exhausted faster. In contrast, animals treated with low dose of 250,000 huMNC2-CD28-1XX CAR T cells to 250,000 implanted tumor cells had on average 1,444 CAR T cells in their tumors at day of sacrifice, which is about the same as when the animals were treated with high dose of huMNC2-CD28-1XX CAR T cells. This result shows that the mutated CD3z signaling domain resists T cell exhaustion.

[0640] However, looking at the excised tumors from animals implanted with tumors that only have 7.5% expressing high levels of antigen but treated with high dose of CAR T cells-2.5M CAR T cells to 250,000 implanted tumor cells—shows that mutations that slow the signaling of CD3-z also do something else. It follows that with low antigen density but high dose of CAR T cells, the CAR T cells would signal less due to lesser numbers of antigen molecules and thus would not get exhausted. Unexpectedly, as can be seen in the Table of FIG. 259, 7.5% high antigen expressing tumors excised from animals treated with high, 10:1 dose of CAR T cells still do not have significant numbers of CAR T cells in their tumors if treated with CARs having wild type CD3z. Tumors from animals treated with huMNC2-CD28-1XX had on average 1,555 CAR T cells in the excised tumor, compared with only 167 in tumors from huMNC2-41BB-3z treated mice and 275 in tumors from huMNC2-CD28-3z treated mice. This result strongly argues that, unexpectedly, CAR T cells with a 1XX mutated CD3z, or similar mutated signaling domain, have enhanced ability to recognize and kill tumor cells that express low levels of the target antigen.

[0641] Similarly, standard CAR T cells could not recognize nor kill tumors that expressed a low percentage, 7.5%, of high antigen expressing cells when animals were also treated with a low dose of CAR T cells. The Table of FIG. 264 shows that of the mice implanted with tumors that were only 7.5% high antigen expressing cells that were treated with low dose CAR T cells (250,000 CAR T cells and 250,000 tumor cells, 1:1 ratio) only the animals treated with huMNC2-CD28-1XX had measurable CAR T cells in their tumors, 841 on average, and those CAR T cells showed almost no signs of exhaustion.

[0642] Similar results were obtained when cells from the spleens of the animals were analyzed (FIG. 265-FIG. 273). One striking example is shown in FIG. 273. Analysis of spleens excised from animals bearing tumors that were 7.5% high antigen expressing cells when implanted, showed that only spleens from animals treated with huMNC2-CD28-1XX had detectable CAR T cells, wherein they had on average 1,413 CAR T cells in their tumors.

[0643] The trend was also observed when the blood from the treated animals was analyzed by flow cytometry as shown in FIG. 274-FIG. 282.

[0644] These experiments demonstrate that anti-MUC1* CAR T cells kill MUC1* positive tumor cells and that the killing is enhanced when the CAR incorporates a mutated CD3z domain such as one with the 1XX mutations. The experiments also show an unexpected result that CAR T cells with the 1XX CD3z domain have enhanced ability to recognize and kill tumor cells that express low levels of the target antigen. Thus, CAR T cells bearing 1XX, including but not limited to CARs that recognize MUC1*, have improved killing of solid tumor cancers, where tumors are more heterogeneous than blood cancers. Also, CAR T cells bearing 1XX, including but not limited to CARs that recognize MUC1*, are far better than standard CAR T cells at preventing tumor recurrence.

[0645] One aspect of the invention is a method for treating a patient diagnosed with, suspected of having, or at risk of developing a MUC1 positive or MUC1* positive cancer, wherein the patient is administered an effective amount of immune cells that have been transduced with a MUC1* targeting CAR. In another aspect of the invention, the immune cells are T cells isolated from a patient, which are then transduced with CARs wherein the targeting head of the CAR binds to MUC1*, and after expansion of transduced T cells, the CAR T cells are administered in an effective amount to the patient. In yet another aspect of the invention, the immune cells are T cells isolated from a patient, which are then transduced with CARs wherein the targeting head of the CAR comprises portions of MNC2, MNE6, 20A10, 3C2B1, 5C6F3, 25E6, 18G12, 28F9, 1E4, B12, B2, B7, B9, 8C7F3, or H11, and after optional expansion of transduced T cells, the CAR T cells are administered in an effective amount to the patient. In another aspect of the invention, the antibody fragment of MNC2, MNE6, 20A10, 3C2B1, 5C6F3, or 25E6 is incorporated into a chimeric antigen receptor of a natural killer cell, or NK cell.

### Specificity of Anti-MUC1* Targeting Antibodies

[0646] As these experiments demonstrate, the critical portion of a CAR is the antibody fragment that directs the immune cell to the tumor cell. As we will show in the following section, MNE6, MNC2, 20A10, 3C2B1 and 5C6F3 are highly specific for the form of MUC1* that is expressed on tumor cells. The next most important part of a CAR is the cytoplasmic tail bearing immune system co-stimulatory domains and the signaling domain CD3-zeta or variations thereof. The identity of these domains modulates the degree of immune response but does not affect the specificity. As shown, the identity of the transmembrane portion of a CAR is the least important. It appears that as long as the transmembrane portion has some flexibility and is long enough to allow the antibody fragment to reach its cognate receptor on the tumor cell, it will suffice. CARs comprising the MNE6 targeting antibody fragment, and intracellular co-stimulatory domains 41BB and CD3-zeta but having a variety of different extracellular, transmembrane and short cytoplasmic tail all worked in that they specifically killed the targeted cells while stimulating the expansion of the host T cells.

[0647] The most accurate way of demonstrating antibody specificity is testing the antibody on normal human tissue specimens compared to cancerous tissue specimens. MNC2 and MNE6 were previously shown to specifically bind to MUC1 or MUC1* positive cancer cells. Several breast tumor arrays were assayed using several anti-MUC1 or MUC1* antibodies. Essentially the studies involving serial sections of breast cancer tissue specimens from over 1,200 different breast cancer patients showed that very little full-length MUC1 remains on breast cancer tissues. The vast majority of the MUC1 expressed is MUC1* and is stained by MNC2. The analysis was performed by Clarient Diagnostics and tissue staining was scored using the Allred method. For example, FIG. 10 shows serial sections of breast cancer tissue arrays that were stained with either VU4H5, a commercially available anti-MUC1 antibody that binds to the tandem repeats, or MNC2 that binds to MUC1*. FIGS. 10 and 11 are photographs of breast cancer tissue arrays stained with either VU4H5 which recognizes MUC1-FL (full length) or MNC2 which recognizes cancerous MUC1*. Tissue staining was scored using Allred scoring method which combines an intensity score and a distribution score. Below the photographs of the tissue arrays are color-coded graphs displaying the results. As can be seen, the arrays stained with VU4H5 are very light and many tissues do not stain at all despite the published reports that MUC1 is aberrantly expressed on over 96% of all breast cancers as evidenced by nucleic acid based diagnostics. In contrast, the arrays stained with MNC2 are very dark (red versus yellow or white in graph). Additionally, many tissues did not stain at all with anti-full-length MUC1 but stained very dark with MNC2, (see green boxes in graph). Similarly, we stained normal or cancerous breast tissues with humanized MNE6 scFv-Fc. The antibody fragment was biotinylated so it could be visualized by a secondary streptavidin based secondary. As can be seen in FIG. 12, hMNE6 scFv-Fc does not stain normal breast tissue but stains cancerous breast tissue. Further, the intensity and homogeneity of staining increases with tumor grade and/or metastatic grade of the patient (FIGS. 12-13). Similarly, hMNE6 scFv-Fc did not stain normal lung tissue but did stain lung cancer tissue (FIGS. 14-18) and the intensity and distribution of staining increased as tumor grade or metastatic grade increased. FIG. 19 shows photographs of normal small intestine and cancerous small intestine tissues stained with humanized MNE6-scFv-Fc biotinylated anti-MUC1* antibody at 5 ug/mL, then stained with a secondary streptavidin HRP antibody. A) is a normal small intestine tissue. B) is small intestine cancer from patient as denoted in the figure. C,D are photographs of the corresponding serial sections that were stained with the secondary antibody alone. FIG. 20 shows photographs of normal small intestine tissues stained with humanized MNE6-scFv-Fc anti-MUC1* antibody at 50 ug/mL, then stained with a secondary goat-anti-human HRP antibody. A-D are normal small intestine tissue. E-H are photographs of the corresponding serial sections that were stained with the secondary antibody alone. FIG. 21 shows photographs of cancerous small intestine tissues stained with humanized MNE6-scFv-Fc anti-MUC1* antibody at 50 ug/mL, then stained with a secondary goat-anti-human HRP antibody. A-D are cancerous small intestine tissue from a patient as denoted in figure. E-H are photographs of the corresponding serial sections that were stained with the secondary antibody alone. FIG. 22 shows photographs of cancerous small intestine tissues stained with humanized MNE6-scFv-Fc anti-MUC1* antibody at 50 ug/mL, then stained with a secondary goat-anti-human HRP antibody. A-D are cancerous small intestine tissue from a patient as denoted in figure. E-H are photographs of the corresponding serial sections that were stained with the secondary antibody alone. FIG. 23 shows photographs of normal colon tissues stained with humanized MNE6-scFv-Fc anti-MUC1* antibody at 50 ug/mL, then stained with a secondary goat-anti-human HRP antibody. A-D are normal colon. E-H are photographs of the corresponding serial sections that were stained with the secondary antibody alone. FIG. 24 shows photographs of colon cancer tissues stained with humanized MNE6-scFv-Fc anti-MUC1* antibody at 50 ug/mL, then stained with a secondary goat-anti-human HRP antibody. A-D are colon cancer tissue from a metastatic patient as denoted in figure. E-H are photographs of the corresponding serial sections that were stained with the secondary antibody alone. FIG. 25 shows photographs of colon cancer tissues stained with humanized MNE6-scFv-Fc anti-MUC1* antibody at 50 ug/mL, then stained with a secondary goat-anti-human HRP antibody. A-D are colon cancer tissue from a Grade 2 patient as denoted in figure. E-H are photographs of the corresponding serial sections that were stained with the secondary antibody alone. FIG. 26 shows photographs of colon cancer tissues stained with humanized MNE6-scFv-Fc anti-MUC1* antibody at 50 ug/mL, then stained with a secondary goat-anti-human HRP antibody. A-D are colon cancer tissue from a metastatic patient as denoted in figure. E-H are photographs of the corresponding serial sections that were stained with the secondary antibody alone. FIG. 27 shows photographs of prostate cancer tissues stained with humanized MNE6-scFv-Fc anti-MUC1* antibody at 50 ug/mL, then stained with a secondary goat-anti-human HRP antibody. A-D are prostate cancer tissue from a patient as denoted in figure. E-H are photographs of the corresponding serial sections that were stained with the secondary antibody alone. FIG. 28 shows photographs of prostate cancer tissues stained with humanized MNE6-scFv-Fc anti-MUC1* antibody at 50 ug/mL, then stained with a secondary goat-anti-human HRP antibody. A-D are prostate cancer tissue from a patient as denoted in figure. E-H are photographs of the corresponding serial sections that were stained with the secondary antibody alone. FIG. 29 shows photographs of prostate cancer tissues stained with humanized MNE6-scFv-Fc anti-MUC1* antibody at 50 ug/mL, then stained with a secondary goat-anti-human HRP antibody. A-D are prostate cancer tissue from a patient as denoted in figure. E-H are photographs of the corresponding serial sections that were stained with the secondary antibody alone.

[0648] One aspect of the invention is a method for treating a patient diagnosed with, suspected of having, or at risk of developing a MUC1 positive or MUC1* positive cancer, wherein a specimen is obtained from the patient's cancer and is tested for reactivity with an antibody that binds to PSMGFR SEQ ID NO:2, or more specifically to the N-10 peptide (SEQ ID NO:3), or yet more specifically binds to N-10 peptide (SEQ ID NO:3), but does not bind to C-10 peptide (SEQ ID NO:825). The patient is then treated with an scFv, scFv-Fc or CAR T that comprises antibody variable fragments from the antibody that reacted with their cancer specimen or can be chosen from among MNC2, MNE6, 20A10, 3C2B1, 5C6F3, 25E6, 18G12, 28F9, 1E4, B12, B2, B7, B9, 8C7F3, or H11. Another aspect of the invention is a method for treating a patient diagnosed with, suspected of having, or at risk of developing a MUC1 positive or MUC1* positive cancer, wherein a specimen is obtained from the patient's cancer and is tested for reactivity with MNC2, MNE6, 20A10, 3C2B1, 5C6F3, 25E6, 18G12, 28F9, 1E4, B12, B2, B7, B9, 8C7F3, or H11; the patient is then treated with the antibody, antibody fragment, scFv, scFv-Fc-mut, BiTE or CAR T that comprises portions of the antibody that reacted with their cancer specimen.

[0649] As we previously reported, it is MUC1*, the transmembrane cleavage product, not full-length MUC1, the is a growth factor receptor that drives tumor growth. The growth factors that activate MUC1* bind to ectopic sites that are only exposed after cleavage and release of the tandem repeat portion of MUC1. Antibodies of the invention, like the activating growth factors, cannot bind to full-length MUC1. FACS analysis clearly shows that anti-MUC1* antibody MNC2 is unable to bind to HCT-116, MUC1 negative cells (FIG. 35A), binds robustly to those cells if they are transfected with MUC1* (FIG. 35B), but will not bind to HCT cells transfected with full-length MUC1 (FIG. 35C). A commercially available anti-tandem repeat antibody VU4H5 clearly recognizes full-length MUC1 (FIG. 35D).

[0650] We discovered that MUC1 can be cleaved to MUC1* by more than one cleavage enzyme and that the site of cleavage affects its fold and consequently affects which monoclonal antibody is able to recognize that form of MUC1*. Different cancer cells or cancerous tissues express different cleavage enzymes. We tested various cleavage enzyme inhibitors on different cancer cell lines and found that an inhibitor that inhibits cleavage of MUC1 in one cancer cell line did not inhibit its cleavage in another cancer cell line. Similarly, PCR experiments showed that cleavage enzymes are expressed at different levels in different cells or cell lines. For example, hematopoietic stem cells of the bone marrow express a MUC1* that is recognized by monoclonal antibody MNC3 but not MNE6 or MNC2 (FIG. 39). The growth of DU145 prostate cancer cells and T47D breast cancer cells is inhibited by the Fabs of MNC2 and MNE6 but not by the Fabs of MNC3 or MNC8, indicating that the cancer cell lines express a MUC1* that is recognized by MNE6 and MNC2 but not by MNC3 or MNC8 (FIG. 42). PCR experiments show that CD34 positive cells of the bone marrow express about 2,500-times more MMP2 and about 350-times more ADAM28 than T47D breast cancer cells, while DU145 prostate cancer cells express about 2,000-times more ADAM TS16, about 400-times more MMP14 and about 100-times more MMP1 than T47D breast cancer cells (FIG. 43 and FIG. 44). Conversely, T47D breast cancer cells express about 80-times more MMP9 than the bone marrow cells and about twice as much as DU145 prostate cancer cells. Various cleavage enzyme inhibitors were tested for their ability to inhibit cleavage in different kinds of cancer cells.

General Strategy for Using Antibodies, Antibody Fragments and CARs that Target the Extracellular Domain of MUC1*

[0651] In one aspect of the invention, a second factor, which may be a cleavage enzyme, an antibody, a cytokine, or a second CAR, and a CAR are transduced into the same T cell. In another aspect of the invention, the second factor is on an inducible promoter such that its expression is activated when the CAR engages the targeted cancer cells. In some cases, the expression of the second factor is controlled by an inducible promoter. In one aspect of the invention, expression of the second factor is induced when the immune cell is activated, for example when it recognizes or engages its target. In one example, a T cell is transfected or transduced with a second factor whose expression is induced when the T cell recognizes a target cancer cell. One way to do this is to induce expression of the second factor when, or shortly after, an NFAT protein is expressed or translocated to the nucleus. For example, a sequence derived from an NFAT promoter region is put upstream of the gene for the second factor. In this way, when the transcription factors that bind to the promoter of the NFAT protein are present in sufficient concentration to bind to and induce transcription of the NFAT protein, they will also bind to that same promoter that is engineered in front of the sequence for transcription of the second factor. The NFAT protein may be NFAT1 also known as NFATc2, NFAT2 also known as NFATc or NFATc1, NFAT3 also known as NFATc4, NFAT4 also known as NFATc3, or NFAT5. In one aspect of the invention, the NFAT is NFATc1, NFATc3 or NFATc2. In one aspect of the invention, the NFAT is NFAT2 also known as NFATc1. SEQ ID NO:646 shows nucleic acid sequence of the upstream transcriptional regulatory region for NFAT2. The promoter sequence for NFAT gene may include the nucleic acid sequence of SEQ ID NO:781-783 or SEQ ID NO:815 as examples, but it can be seen that the optimal sequence or minimal sequence for expression of the second factor may be obtained by making fragments, extensions or mutations of the promoter and testing for the strength of the promoter with respect to expression of the second factor. In one aspect of the invention, the transcriptional regulatory region for NFAT2 is engineered upstream of the gene encoding the second factor, which if for cleavage enzyme MMP9 (SEQ ID NO:647) or the catalytic sub-unit of MMP9 (SEQ ID NO:648). In one aspect of the invention, the NFAT is NFATc3 and the promoter sequence of NFATc3 includes nucleic acid sequences from SEQ ID NO:816. In one aspect of the invention, the transcriptional regulatory region for NFATc3 is engineered upstream of the gene encoding the second factor, here as an example is MMP9. In another aspect of the invention, the NFAT is NFATc2. SEQ ID NO:817-818 shows nucleic acid sequence of the upstream transcriptional regulatory region for NFATc2. In one aspect of the invention, the transcriptional regulatory region for NFATc2 is engineered upstream of the gene encoding the second factor, which may be cleavage enzyme MMP9 (SEQ ID NO:647) or the catalytic sub-unit of MMP9 (SEQ ID NO:648).

[0652] Another method for having the expression of the second factor induced when the T cell or CAR T cell is activated is to have the gene for the second factor on an inducible promoter where the NFAT protein itself binds to and induces transcription of the second factor. In this case, an NFAT response element (NFAT RE) may be positioned upstream of the gene for the second factor or fragment of the second factor. The NFAT may bind to its responsive element upstream of the second factor alone or as part of a complex. The NFAT protein may be NFATc1, NFATc2, NFATc3, NFATc4, or NFAT5. In a preferred embodiment, the NFAT protein is NFAT2 aka NFATc1, aka NFATc. The gene of the second factor or fragment thereof is cloned downstream of an NFAT-response element (SEQ ID NO:649), which may be repeats of the response element (SEQ ID NO:650) and CMV minimal promoter (mCMV) (SEQ ID NO:651) to induce expression of second factor by NFAT protein. The NFAT response element may include nucleic acid sequence of NFAT consensus sequence (SEQ ID NO:804). The NFAT response element may include the nucleic acid sequence of SEQ ID NOS:805-814 as examples, but it can be seen that the optimal sequence or minimal sequence for expression of the second factor may be obtained by making fragments, extensions or mutations of the responsive element nucleic acid and testing for the strength of the responsive element with respect to expression of the second factor. The enhancer region of Foxp3 also contains NFAT response elements within the 120-bp from 2079 to 2098 (SEQ ID NO:821). The NFAT response element may include nucleic acid NFAT consensus sequence of (5′-cattttttccat-3′) (SEQ ID NO:819) or (5′-tttttcca-3′) (SEQ ID NO:820), which NFATc1 specifically binds to (Xu et al., Closely related T-memory stem cells correlate with in vivo expansion of CAR. CD19-T cells and are preserved by IL-7 and IL-15, Blood 2014 123:3750-3759), or repeats thereof. The NFAT response elements may also be separated by nucleic acid spacer sequences. Other NFAT responsive elements may exist and may further be discovered, and a skilled artisan in the art when directed to determine NFAT responsive element may do so by carrying out molecular biological assays to obtain it given the guidance of at least the responsive elements as set forth as SEQ ID NOS: 804-814 albeit as only mere examples. In one aspect of the invention, the cleavage enzyme that is downstream of the NFAT-response element and CMV minimal promoter is MMP9 (SEQ ID NO:652). In another aspect of the invention, the cleavage enzyme is a catalytic sub-unit of MMP9 (SEQ ID NO:653).

[0653] Because NFATs 1-4 are regulated by the calcineurin pathway, potential toxicities that may arise in a patient can be stopped by treatment with an immunosuppressive agent such as FK506, Cyclosporin, Cyclosporin A, or Tacrolimus that block calcineurin activity and inhibit NFAT translocation to the nucleus. The T cell transduced or transfected with a cleavage enzyme on an inducible promoter may also be transfected or transduced with a CAR that recognizes a protein or molecule on the cancer cell. In a specific example, the cleavage enzyme is one that is able to cleave MUC1 full-length and the CAR bears an antibody fragment that directs it to MUC1* on the surface of cancer cells.

[0654] To determine which cleavage enzymes cleave MUC1 on cancer cells, we tested a series of MMP and ADAM enzyme inhibitors. These experiments pointed to MMP9 as being an important cleavage enzyme in cancer cells. To confirm that MMP9 cleaves MUC1 on cancer cells, we transfected HCT-116 MUC1 negative colon cancer cells with a mimic of full-length MUC1 having 41 tandem repeat domains: HCT-MUC1-41TR. Through single cell cloning we were able to establish this cell line wherein MUC1 only minimally gets cleaved to MUC1*. FIGS. 36A-36D show Western blots and FACS analysis showing that HCT-MUC1-41TR is 95% positive for full-length MUC1 and only 5-10% positive for the cleaved form, MUC1*. HCT-MUC1-41TR cells were incubated with MMP9 at varying concentrations and then assayed by immunofluorescence to measure binding of MNC2 monoclonal antibody to the resultant cells. As can be seen in FIGS. 37A-37C binding of MNC2 increased as the concentration of MMP9 added to the cells increased. These experiments show that MMP9 cleaves MUC1 to a form that is recognized by MNC2. The human cancer tissue array studies we performed (FIG. 30A-30F, FIG. 31A-31F, FIG. 32A-32F, FIG. 33A-33F) show that MNC2 recognizes the form of cleaved MUC1 that is present on cancerous tissue but not on healthy cells or tissues (FIG. 34A-341). Importantly, MNC2 does not recognize the form of cleaved MUC1 that is expressed on healthy hematopoietic stem cells of the bone marrow (FIGS. 39-41).

[0655] In one aspect of the invention, an immune cell is transduced with both a CAR to target the immune cell to the tumor, and a cleavage enzyme. The CAR and the cleavage enzyme can be encoded on the same plasmid or on two different plasmids. In one aspect, the cleavage enzyme is on an inducible promoter. In another aspect, expression of the cleavage enzyme is induced by a protein that is expressed when the immune cell is activated. In one case, expression of the cleavage enzyme is induced by an NFAT protein. In another aspect, expression of the cleavage enzyme is induced by NFATc1. In another aspect, expression of the cleavage enzyme is induced when one of the NFAT proteins binds to an NFAT response element that is inserted upstream of the gene for the cleavage enzyme or a catalytically active fragment thereof. In one aspect, the cleavage enzyme is MMP9 or a fragment of MMP9 that is catalytically active.

[0656] In one aspect of the invention, the cleavage enzyme is MMP9 (SEQ ID NO:643). Some cleavage enzymes are naturally expressed as pro-enzymes that need to be activated. This can be accomplished by biochemical means, by expressing a co-enzyme that activates a cleavage enzyme or by engineering the enzyme in an activated form. The invention anticipates overcoming this problem by co-expressing the cleavage enzyme with its activator. In one aspect of the invention, the cleavage enzyme is MMP9 and the co-activator is MMP3. In another aspect of the invention, the cleavage enzyme is expressed in a form that is already active, for example by expressing a fragment of the cleavage enzyme that still has catalytic function. In one case, the cleavage enzyme is an MMP9 fragment that is catalytically active. One example of an MMP9 catalytic fragment is given as SEQ ID NO:645.

[0657] MMP9, which must be activated by MMP3, is overexpressed in a large percentage of solid tumors. Further, it is known that MNC2 anti-MUC1* monoclonal antibody recognizes MUC1 after it is cleaved by MMP9. The various breast, ovarian, pancreatic and lung cancer tissue arrays that were shown in FIGS. 30-33 were probed with MNC2-scFv, further indicating that MUC1 in these cancers is being cleaved by MMP9. To see if cleavage of tumors by MMP9 would increase T cell access to the tumor, we did a series of experiments using a cell line that expresses full-length MUC1, HCT-MUC1-41TR, a breast cancer cell line that is a high expresser of both full-length MUC1 and MUC1* and a MUC1 negative cell line that we transfect with MUC1*45. We transfected cells with MMP9 and MMP3, which activates MMP9. We took the supernatant of those cells, which contained activated MMP9, and added it to the various cells, which were then co-cultured with T cells transduced with an anti-MUC1* CAR: huMNC2-CAR44. The result was greatly increased CAR T cell killing of the targeted MUC1/MUC1* positive cancer cells, compared to the control cells that were not incubated with a MUC1 cleavage enzyme.

[0658] APMA is a biochemical that activates MMPs. We used APMA along with the conditioned media of cells that we transfected with either MMP9 or ADAM17 to see if any of these cleavage enzymes would cleave MUC1 on the HCT-MUC1-41TR cell line that only expresses full-length MUC1. As controls, we also tested the enzymes on HCT-MUC1* cells. The MUC1 and MUC1* expressing cells were stained with a red dye, CMTMR. Human T cells that were transduced with an anti-MUC1* CARs, CAR44 or CAR50 were co-cultured with the cancer cells. Untransduced T cells were used as a control (FIG. 45A-45P). As can be seen in FIG. 45B, FIG. 45C, and FIG. 45D, the anti-MUC1* CAR T cells effectively recognized and clustered the HCT-MUC1* cancer cells, which is a sign of T cell activation and killing. However, no CAR T cell induced clustering is visible in the wells containing HCT-MUC1-41TR, the full-length MUC1 expressing cells (FIG. 45F, FIG. 45G, and FIG. 45H). However, the cells that were incubated with activated MMP9 show dramatic increase in CAR T cell induced clustering (FIG. 45J, FIG. 45K, and FIG. 45L), indicating that MMP9 cleaved the full-length MUC1 to a form of MUC1* that is recognized by MNC2 monoclonal antibody and more specifically by huMNC2-scFv. ADAM17 had no apparent effect. ADAM17 either did not cleave MUC1 or cleaved it at a position that is not recognized by MNC2, which is more likely (FIG. 45N-45P).

[0659] We performed the same experiment, this time using T47D breast cancer cells that were hard to kill using anti-MUC1* CAR T cells presumably because they express high levels of full-length MUC1 as well as MUC1* (FIG. 46A-46T). As can be seen in FIGS. 46B, 46C, and 46D, anti-MUC1* CAR44 and CAR50 have little effect on the T47D cancer cells. Only in FIG. 46D, which is CAR44 at the highest level of CAR expression in the T cells, do we see a small amount of CAR T cell induced clustering. However, the presence of activated MMP2 (FIG. 46J, 46K, 46L) or activated MMP9 (FIG. 46R, 46S, 46T) shows a dramatic increase in CAR T cell recognition, clustering and killing, showing that cleavage of full-length MUC1 increases T cell access to the cancer cells. To ensure that the addition of the APMA was not inducing cleavage or anti-MUC1* CAR T recognition by some other mechanism, we made a catalytically active form of MMP9 and added it to T47D cells that were then co-cultured with MNC2-CAR44 T cells (FIG. 47A-47I). As can be seen in the figure, MNC2-CAR T cells recognize and cluster cells transfected with MUC1* (FIG. 47B-47C), poorly cluster T47D breast cancer cells that express both full-length MUC1 and MUC1* (FIG. 47E-47F), but robustly bind to and cluster the T47D cells after the addition of the catalytically active MMP9 (FIG. 47H-47I). This results supports the claim that MNC2 does not recognize full-length MUC1 but does recognize the growth factor receptor MUC1*. Note that the full-length MUC1 expressed on this cell line may sterically hinder the binding of CAR T cells near the cell membrane.

[0660] In another example, T47D MUC1 positive tumor cells were incubated with a recombinant catalytic domain of MMP9 (Enzo Life Sciences, Inc., Farmingdale, NY) at either 100 ng/mL or 500 ng/mL. Western blot analysis showed that the MUC1/MUC1* positive cancer cells underwent extensive cleavage of MUC1 to MUC1*. In another example, T47D breast cancer cells were pre-incubated with a human recombinant MMP9 catalytic domain protein then co-cultured with anti-MUC1* CAR44 T cells. The specific killing of the T47D cells by CAR44 T cells was monitored in real-time on an xCelligence instrument that measures impedance as a function of time. This analysis uses electrode arrays upon which cancer cells are plated. The adherent cancer cells insulate the electrode and cause an increase in impedance as they grow. Conversely, T cells are not adherent and remain in suspension so do not increase or decrease impedance. However, if the T cells or CAR T cells kill the cancer cells on the electrode plate, the cancer cells ball up and float as they die, which causes the impedance to decrease. The addition of MMP9 catalytic domain dramatically increased the killing of T47D cancer cells. FIG. 48 shows an xCelligence graph of T47D breast cancer cells in co-culture with either untransduced T cells, as a control, or huMNC2-CAR44 T cells over a 45 hour period. After 18 hours of cancer cell growth, a catalytic sub-unit MMP9 was added to some of the cells. At 25 hours, T cells were added. As can be seen, huMNC2-CAR44 T cell killing is greatly improved when the T47D cells are pre-incubated with cleavage enzyme MMP9. In the xCelligence system, target cancer cells, which are adherent, are plated onto electrode array plates. Adherent cells insulate the electrode and increase the impedance. The number of adherent cancer cells is directly proportional to impedance. T cells are not adherent and do not contribute to impedance. Therefore, increasing impedance reflects growth of cancer cells and decreasing impedance reflects killing of cancer cells. Prostate cancer cell line DU145 expresses both MUC1 and MUC1* but at a much lower level of expression than T47D cells. DU145 cells are efficiently killed by anti-MUC1* CAR T cells in the presence or absence of a cleavage enzyme.

[0661] FIG. 49 shows an xCelligence graph of DU145 prostate cancer cells in co-culture with either untransduced T cells, as a control, or huMNC2-CAR44 T cells over a 45 hour period. After 18 hours of cancer cell growth, a catalytic sub-unit MMP9 was added to some of the cells. At 25 hours, T cells were added. As can be seen, huMNC2-CAR44 T cell killing of low density MUC1/MUC1* positive cancer cells is not affected by pre-incubation with cleavage enzyme MMP9. DU145 cancer cells express a significantly lower amount of MUC1 which includes the full-length form as well as MUC1*. The lower density of full-length MUC1 does not sterically hinder T cell access to the membrane proximal MUC1*. DU145 cells represent an early stage cancer that expresses both full length and cleaved MUC1 but at lower levels so that T cell access is not sterically hindered. T47D cells represent mid-stage cancers that express high levels of both MUC1 and MUC1*, wherein the density of MUC1 full-length sterically hinders access of T cells to the tumor. HCT-MUC1* cells are a MUC1 negative cell line that has been stably transfected with MUC1*45, and they represent late stage cancer cells. It is significant that MUC1 cleaved to MUC1* by MMP9 is recognized by the anti-MUC1* antibody MNC2, which is the targeting head of the CAR. Immune cell access to tumor antigens on the cancer cell surface can be sterically hindered by the presence of bulky extra cellular domain proteins or other obstructing elements also known as the tumor micro-environment. The aforementioned serve as an example that can be extended to improve the efficacy of CAR T therapies that target other tumor antigens. In one aspect of the invention, an immune cell is transfected or transduced with both a CAR comprising an antibody fragment that targets a tumor antigen and a cleavage enzyme. In another aspect of the invention, an immune cell is transfected or transduced with both a CAR comprising an antibody fragment that targets a tumor antigen and a cleavage enzyme that cleaves a tumor antigen to a form recognized by the antibody fragment of the CAR. In one aspect, an immune cell is transfected or transduced with both a CAR comprising an antibody fragment that targets a tumor antigen and a cleavage enzyme that cleaves a tumor antigen to a form recognized by the antibody fragment of the CAR, wherein the antibody fragment of the CAR recognizes MUC1* extra cellular domain and the cleavage enzyme cleaves MUC1 to MUC1*. In one aspect, an immune cell, which may be a T cell or an NK cell, is transfected or transduced with a CAR comprising an antibody fragment derived from MNC2, MNE6, MNC3 or MNC8 and a cleavage enzyme chosen from the group comprising MMP1, MMP2, MMP3, MMP7, MMP8, MMP9, MMP11, MMP12, MMP13, MMP14, MMP16, ADAM9, ADAM10, ADAM17, ADAM 19, ADAMTS16, ADAM28 or a catalytically active fragment thereof. In one aspect of the invention, the immune cell is derived from a stem cell that has been directed to differentiate into an immune cell type in vitro. In another aspect, a CAR containing sequences of the antibody are expressed in a stem cell, which then may be differentiated into an immune cell. In one case, the immune cell is a T cell. In another case, the immune cell is an NK cell.

[0662] In one aspect of the invention, a person diagnosed with cancer or at risk of developing cancer is administered a sufficient amount of an immune cell transduced with both a CAR and a cleavage enzyme. In another aspect of the invention, a person diagnosed with cancer or at risk of developing cancer is administered a sufficient amount of an immune cell transduced with both a CAR and a cleavage enzyme, wherein the cleavage enzyme is on an inducible promoter that is activated by proteins that are expressed when the immune cell becomes activated. In another aspect of the invention, a person diagnosed with cancer or at risk of developing cancer is administered a sufficient amount of an immune cell transduced with both a CAR and a cleavage enzyme, wherein the cleavage enzyme is on an inducible promoter that is activated by one or more NFAT. In one case the NFAT is NFATcT. In another aspect, the NFAT is NFATc3. In another aspect, the NFAT is NFATc2. In any of the instances above, the extra cellular domain of the CAR comprises a fragment of an anti-MUC1* antibody. In one aspect, the anti-MUC1* antibody is MNC2scFv or a humanized form of MNC2scFv. In another aspect, the anti-MUC1* antibody is MNE6scFv or a humanized form of MNE6scFv. In any of the instances above, the immune cell can be a T cell, an NK cell, a mast cell, or a dendritic cell. In one aspect the immune cell is derived from a stem cell that has been directed to differentiate to that immune cell type in vitro. In another aspect, a CAR containing sequences of the antibody are expressed in a stem cell, which then may be differentiated into an immune cell. In one case, the immune cell is a T cell. In another case, the immune cell is an NK cell.

[0663] It is not intended that the present invention be limited to one or two specific methods of having expression of a cleavage enzyme induced by an activated T cell. We have demonstrated specific expression of a cleavage enzyme only upon T cell activation by constructing a plasmid with the cleavage enzyme gene downstream of an NFAT promoter sequence or downstream of one or more repeats of NFAT response elements. In another aspect of the invention, expression of the cleavage enzyme is induced by constructing a plasmid where the cleavage enzyme gene is inserted downstream of an IL-2 promoter sequence or downstream of an IL-2 response element, then inserting the plasmid into an immune cell. In another aspect of the invention, expression of the cleavage enzyme is induced by constructing a plasmid where the cleavage enzyme gene is inserted downstream of a Calcineurin promoter sequence or downstream of a Calcineurin response element, then inserting the plasmid into an immune cell and then administering to a patient for the treatment or prevention of cancers. There are also drug-inducible plasmids that can be used to induce expression of the cleavage enzyme or used to stop expression induced by an element of an activated T cell. These drug inducible systems may include tetracycline-inducible systems, Tet-on, Tet-off, tetracycline response elements, doxycycline, tamoxifen inducible systems, ecdysone inducible systems and the like.

[0664] It is not intended that the present invention be limited to one or two specific promoters used in the plasmids encoding the CARs or inducible cleavage enzymes. As is known by those skilled in the art, many promoters can be interchanged including SV40, PGK1, Ubc, CAG, TRE, UAS, Ac5, polyhedron, CaMKIIa, GAL1, GAL10, TEF1, GDS, ADH1, CaMV35S, Ubi, H1 and U6.Another solution to the problem of steric hindrance of CAR T cell access, caused by bulky cell surface proteins such as MUC1-FL, is to increase the length of the linker region of the CAR that is expressed by the T cell. In standard design CARs, the length of the extracellular linker region between the transmembrane portion and the antibody fragment is about 45-50 amino acids in length. We made long-arm CARs where the length of the extracellular linker is extended from about 50 amino acids to 217-290 amino acids. Co-culture assays show that CARs with longer extracellular linkers have improved access to the tumor-associated antigen on the target cancer cells.

BiTEs, Bispecific Antibodies and Antibody-Like Molecules with Multi-Specificity

[0665] Antibodies of the invention can be incorporated into a molecule comprising at least two binding arms wherein at least two bind to different antigens. Several examples of multi-specific antibody-like molecules have been described (Brinkmann and Kontermann, MABS, Vol. 9, No. 2, 182-212 (2017); Spiess et al. Molecular Immunology 67, 95-106 (2015)), which references are incorporated by reference herein in their entirety, but in particular with respect to disclosures of making of bispecific antibodies and fragments of antibodies that are bispecific. It is also understood that various terminologies such as “CrossMab”, “DutaMab” found in FIG. 217 of the present application and FIG. 1 of Spiess et al. cited herein are terms of art and should be interpreted within the context of the description provided in Spiess et al. or Brinkmann and Kondermann cited herein.

[0666] The variable regions of antibodies of the invention, or fragments thereof, can be incorporated into molecular formats wherein one molecule is able to simultaneously bind to at least two different antigens. The stability of these various antibody-like molecules can be increased by the introduction of Cysteines for the formation of disulfide bonds. The stability of antibodies of the invention as well as of various antibody-like molecules, which may be multi-specific can be increased by the introduction of mutations as more fully described in Beckman, U.S. Pat. No. 9,708,388B2, which reference is incorporated by reference herein in its entirety, but in particular with respect to disclosures of making of bispecific antibodies and fragments of antibodies that are bispecific or multispecific. The invention contemplates incorporating variable regions, or fragments thereof, of antibodies of the invention in combination with other antibodies having other binding specificities, or fragments thereof, into a variety of antibody-like formats including but not limited to the following. Among the possible antibody-like formats are bispecific antibodies, which may or may not include an Fc region. Bispecific antibodies that contain at least one Fc region will have a higher molecular weight and an extended half-life in the body. In a variation of a bispecific Fc-containing antibody, variable regions, or fragments thereof, derived from antibodies with yet other binding specificities are appended to the N- or C-terminus of the IgG scaffold to yield a tetravalent, multi-specificity antibody-like molecule. Combinations of variable regions, or their fragments, of antibodies with diverse binding specificities, which may be incorporated into scFvs, can be appended to an IgG scaffold or other scaffold to yield multi-valent, multi-specificity antibody-like molecules. Antibodies of the invention can be incorporated into mini-antibodies wherein scFvs are fused to the C-terminus of the CH3 portion or hinge region of an antibody Fc region. Divalent (or bivalent) single-chain variable fragments (di-scFvs, bi-scFvs) can be engineered by linking two scFvs. This can be done by producing a single peptide chain with two V_{H} and two Y_{L} regions, yielding tandem scFvs. Another possibility is the creation of scFvs with linker peptides that are too short for the two variable regions to fold together (about five amino acids), forcing scFvs to dimerize. This type is known as diabodies. Diabodies have been shown to have dissociation constants up to 40-fold lower than corresponding scFvs, meaning that they have a much higher affinity to their target. Consequently, diabody drugs could be dosed much lower than other therapeutic antibodies and are capable of highly specific targeting of tumors in vivo. Still shorter linkers (one or two amino acids), and optional addition of disulfide bonds, lead to the formation of trimers, so-called triabodies or tribodies. Tetrabodies and higher order multimers have also been produced They exhibit an even higher affinity to their targets than diabodies.

[0667] Other formats of a bispecific antibody-like molecules are bispecific tandem di-scFvs and bispecific T cell engagers, known as BiTEs (BiTE antibody constructs). BiTEs are fusion proteins consisting of two scFvs of different antibodies, on a single peptide chain of about 55 kilodaltons. Typically, one of the binding arms binds to a molecule on a T cell, such as the CD3 receptor, and the other binding arm binds to a tumor cell via a tumor specific molecule, such as aberrantly expressed MUC1*, All of these formats can be composed from one or more variable fragments of antibodies of the invention, with specificity for at least two different antigens, to generate multi-valent and multi-specific antibody-like molecules. In one aspect, a variable domain fragment derived from a first antibody binds to a first antigen on a first surface and a variable domain fragment derived from a second antibody binds to a second antigen on a second surface, wherein at least one of the surfaces may be the surface of a cell. In another aspect of the invention, at least one of the variable domain fragments comprising a multi-valent, multi-specific antibody-like molecule binds to an antigen that is not associated with a surface. In one aspect, the antigen that is not associated with a surface is a cytokine.

[0668] As an example of how antibodies of the invention can be incorporated into bispecific antibodies, we constructed a bispecific antibody using a knob-in-hole, also known as KTH (Spiess et al. Molecular Immunology 67, 95-106 (2015)), format. In this example, a first arm of the antibody is the humanized anti-MUC1* antibody 20A10, also known as hu20A10, with a 14616 framework region; the second arm of the antibody is either the anti-CD3 antibody OKT3 or 12F6, which both bind to the same epitope on human T cells. The resultant bispecific antibodies are referred to here as 20A10-OKT3-BiTE and 20A10-12F6-BiTE. In a demonstration of function, the bispecific antibodies are added at various concentrations to cells in culture wherein both human T cells and MUC1* positive cancer cells are present. In one case the cancer cells are T47D breast cancer cells and in the other case a MUC1* negative line HCT-116 colon cancer cells have been transduced to express MUC1*, called HCT-MUC1*. As can be seen in the photographs shown in FIGS. 283A-283L, FIGS. 284A-284L, FIGS. 285A-285L and FIGS. 286A-286L, the addition of either bispecific antibody mediated the joining together of the T cells and the MUC1* positive cancer cells as evidenced by a bispecific dose-dependent cell clustering. Two control experiments were performed. In one control, no bispecific antibody is added, but both T cells and MUC1* cancer cells are present. No clustering is observed. In another control, bispecific antibody is added to MUC1* positive cancer cells, but no T cells are present. These data demonstrate that anti-MUC1* antibodies of the invention can be readily incorporated into a bispecific format. In these examples, the second arm of the bispecific antibody was an antibody that recognizes CD3 on T cells. However, it is not intended that the invention be limited to bispecific antibodies where one arm binds to MUC1* and the other binds a T cell. A person skilled in the art could readily substitute the second arm of the bispecific antibody with an antibody that binds to art NK cell, or another receptor on a cancer cell for increased affinity. As MNC2 binds to the same epitope as 20A10, it is evident that a person skilled in the art could readily substitute MNC2 or humanized MNC2 for the 20A10. In one aspect of the invention a person diagnosed with a MUC1* positive cancer, or at risk of developing a MUC1* positive cancer, is treated with art effective amount of a bispecific antibody that simultaneously binds to a. MUC1* positive cancer cell and a human T cell. In another aspect of the invention, the bispecific antibody is hu20A10-OKT3-BiTE. In another aspect of the invention, the bispecific antibody is hu20A10-12F6-BiTE. In another aspect of the invention, the bispecific antibody is huMNC2-OKT3-BiTE. In another aspect of the invention, the bispecific antibody is huMNC2-12F6-BiTE.

[0669] Another aspect of the invention is a method for treating a patient diagnosed with, suspected of having, or at risk of developing a MUC1 positive or MUC1* positive cancer, wherein the patient is administered an effective amount of one of the multi-valent, multi-specific antibody-like molecules described here wherein at least one of the variable domains, or fragment thereof, is derived from an antibody that binds to PSMGFR (SEQ ID NO:2), or more specifically to N-10 peptide (SEQ ID NO:3), or more specifically to N-19 peptide (SEQ ID NO:4), or N-23 peptide (SEQ ID NO:5), or N-26 peptide (SEQ ID NO:6), or N-30 peptide (SEQ ID NO:7) or still more specifically that binds to a fragment of the PSMGFR peptide wherein said binding depends on the presence of the amino acids FPFSAQSGA (SEQ ID NO:10). In one case, the antibody variable fragment that binds to MUC1* comprises portions of MNC2, MNE6, 20A10, 3C2B1, 5C6F3, 25E6, 18G12, 28F9, 1E4, B12, B2, B7, B9, 8C7F3, or H11. In one case, at least one of the antibody variable fragments comprising a multi-valent, multi-specific antibody-like molecule that binds to MUC1* comprises portions of MNC2, MNE6, 20A10, 3C2B1, 5C6F3, 25E6, 18G12, 28F9, 1E4, B12, B2, B7, B9, 8C7F3, or H11 and at least one other antibody variable fragment binds to an antigen on an immune cell, which may be a T cell or NK cell.

[0670] Another aspect of the invention is a method for treating a patient diagnosed with, suspected of having, or at risk of developing a MUC1 positive or MUC1* positive cancer, wherein the patient is administered an effective amount of a BiTE wherein one antibody variable fragment of the BiTE binds to a T cell surface antigen and the other antibody variable fragment of the BiTE binds to PSMGFR (SEQ ID NO:2), or more specifically to N-10 peptide (SEQ ID NO:3), or more specifically to N-19 peptide (SEQ ID NO:4), or N-23 peptide (SEQ ID NO:5), or N-26 peptide (SEQ ID NO:6), or N-30 peptide (SEQ ID NO:7) or still more specifically that binds to a fragment of the PSMGFR peptide wherein said binding depends on the presence of the amino acids FPFSAQSGA (SEQ ID NO:10). In one case, the antibody variable fragment of the BiTE that binds to MUC1* comprises portions of MNC2, MNE6, 20A10, 3C2B1, 5C6F3, 25E6, 18G12, 28F9, 1E4, B12, B2, B7, B9, 8C7F3, or H11.

[0671] In another aspect of the invention, MUC1* peptides including PSMGFR (SEQ ID NO:2), or most or all of N-10 peptide are used in adoptive T cell approaches. In this case, a patient's T cells are exposed to the MUC1* peptides and through various rounds of maturation, the T cells develop MUC1* specific receptors. The adapted T cells are then expanded and administered to the donor patient who is diagnosed with, suspected of having, or is at risk of developing a MUC1* positive cancer.

[0672] A series of CARs were also made that had MNC2 and humanized MNC2 as the extra cellular, targeting head of the CAR. The constructs for these CARs were inserted into a plasmid that was then inserted into a Lenti viral vector. Human T cells were then transduced with the lenti viral vector carrying the MNC2 CARs and huMNC2 CARs. MNC2-scFv-CARs that were mouse sequence or humanized were generated. In one aspect of the invention, the CAR comprised huMNC2-scFv-short hinge region-transmembrane domain derived from CD8-short intracellular piece-4-1BB-3zeta. In another aspect, the transmembrane domain was derived from CD4 transmembrane sequence. In another aspect, the intracellular co-stimulatory domain was CD28-3zeta. In yet another aspect, the intracellular co-stimulatory domain was CD28-4-1BB-3zeta.

[0673] There are a variety of methods for assessing whether or not T cells recognize a target cell and are in the process of mounting an immune response. T cells cluster when they recognize a target or foreign cell. This can be readily seen with the naked eye or at low magnification. The appearance of CAR T cell clustering when co-cultured with target cancer cells is one measure of: a) whether or not they recognize the cells as target cells; and b) whether or not they are getting activated to attack the targeted cells, which in this case are cancer cells. FIGS. 45-47 show photographs of MUC1* positive T47D breast cancer cells that were either stably transfected with mCherry or dyed with CMTMR, so are red, which were co-cultured with either human T cells without a CAR or human T cells transduced with huMNC2-scFv-CAR44, or with huMNC2-scFv-CAR50. The CAR T cells are clear. As can be seen, there is no T cell induced clustering of the cancer cells when the T cell does not carry a CAR. However, when T cells carrying a MUC1* targeting CAR, there is dramatic clustering of the MUC1* positive cancer cells.

[0674] After T cells recognize and cluster target cells, they overexpress perform and granzyme B. Together these two molecules activate a cell death pathway in the targeted cell. It is thought that the perform makes a hole in the target cell into which the T cell injects granzyme B which then activates apoptotic proteases, causing the target cell to lyse. FIG. 55 and FIG. 56 show huMNC2-scFV-CAR44 T cells binding to target MUC1* positive prostate cancer and pancreatic cancer cells and injecting granzyme B.

[0675] Another measure of whether or not a T cell has recognized a target cell and is activated to kill that cell, is the upregulation and secretion of cytokines, interferon gamma (IFN-g) and interleukin-2 (IL-2), by the T cell. Activation of CAR T cells, as evidenced by IFN-g and IL-2 secretion, can be readily measured in vitro. CAR T cells are co-cultured with target cells and after an incubation period, the conditioned media is assayed by ELISA to detect secreted IFN-g and IL-2. In order to determine the cancer-specificity of CAR T cells wherein the targeting head of the CAR was either huMNC2 or huMNE6, these experiments were performed with huMNC2-CAR44 T cells and huMNE6-CAR44 T cells in co-culture with MUC1* positive cancer cells and normal cells. Table 1 details the MUC1 positive normal or primary cells that were tested.

TABLE 1
Normal Cell Lines and Primary Cells

| | ATCC | | |
|---|---|---|---|
| Cell Line | Designation | Tissue | Origin |
| Hep.G2 | | Liver | |
| THLE-3 | CRL-11233 | Liver | The THLE-2 (ATCC CRL-10149 and the |
| | | | THLE-3 (ATCC CRL-11233) cell lines |
| | | | were derived from primary normal liver |
| | | | cells by infection with SV40 large T |
| | | | antigen. THLE-2 and THLE-3 cells |
| | | | express phenotypic characteristics of |
| | | | normal adult liver epithelial cells. They are |
| | | | nontumorigenic when injected into |
| | | | athymic nude mice, have near-diploid |
| | | | karyotypes, and do not express alpha- |
| | | | fetoprotein. |
| Lonza | HUM181141 | Liver | Male, Caucasian |
| Primary | | | 2.0 months old |
| Hepatocytes | | | Induction Fold CYP1A2 (a) 14.0 |
| | | | Induction Fold CYP2B6 (b) 13.0 |
| | | | Induction Fold CYP3A4 (c) 44.0 |
| | | | Basal Activity CYP1A2 2.6 |
| | | | Basal Activity CYP2B6 0.7 |
| | | | Basal Activity CYP3A4 14.0 |
| | | | Additional Information: |
| | | | Inducer/Marker Metabolite |
| | | | (a) 0.05 mM Omeprazole/Acetaminophen |
| | | | (b) 1 mM Phenobarbital/ |
| | | | Hydroxybupropion |
| | | | (c) 0.01 mM Rifampicin/6-Beta- |
| | | | Hydroxytestosterone |
| | | | Basal activity is expressed as: |
| | | | pmol/million cells/minute |
| T/G HA- | CRL-1999 | Aortic Smooth | 11 months |
| VSMC | | Muscle | Female, Caucasian |
| CCD-18Lu | CCL-205 | Lung | This fibroblast-like cell line was derived |
| | | | from the lung tissue of a 2 month, 17-day- |
| | | | old Black female. |
| | | | The donor had cerebral anoxia, cardiac |
| | | | anomaly, sepsis, endocardial cushion |
| | | | defect and fetal alcoholic syndrome. |
| | | | Female, Black |
| | | | 2.5 months |
| HBEC-5i | CRL-3245 | Brain | Derived from small fragments of human |
| | | endothelium | cerebral cortex obtained from patients who |
| | | | had died of various causes. |
| Hs | CRL-7869 | Stomach/Intestine | 18 weeks gestation fetus |
| 738.St/Int | | | Male, Caucasian |
| | | | Part of the NBL Cell Line Collection. This |
| | | | cell line is neither produced nor fully |
| | | | characterized by ATCC. We do not |
| | | | guarantee that it will maintain a specific |
| | | | morphology, purity, or any other property |
| | | | upon passage. |
| MCF-12A | CRL-10782 | Breast | The MCF-12A cell line is a non- |
| | | | tumorigenic epithelial cell line established |
| | | | from tissue taken at reduction |
| | | | mammoplasty from a nulliparous patient |
| | | | with fibrocystic breast disease that |
| | | | contained focal areas of intraductal |
| | | | hyperplasia. The line was produced by |
| | | | long term culture in serum free medium |
| | | | with low Ca++ concentration. MCF-12A |
| | | | was derived from adherent cells in the |
| | | | population. |
| Hs 1.Tes | CRL-7002 | Testis | Male, Caucasian |
| | | | second trimester |
| | | | Part of the NBL Cell Line Collection. This |
| | | | cell line is neither produced nor fully |
| | | | characterized by ATCC. We do not |
| | | | guarantee that it will maintain a specific |
| | | | morphology, purity, or any other property |
| | | | upon passage. |
| HRCE | Lonza: | Kidney | Human Renal Cortical Cells (HRCE) are |
| | catalogue # | | from proximal and distal tubules. |
| | CC-2554 Lot | | Donor info: 49 year old female, passage 2, |
| | # | | 95% viability, doubling time (hours) 24 hrs |
| | 0000542104 | | |

[0676] FIG. 50 is a graph of PCR measurement of the various cell lines tested, wherein mRNA levels of MUC1 are measured. The cancer cell lines that were tested in these assays were HCT-MUC1* and T47D breast cancer cells. These cells were co-cultured with huMNC2-CAR44 human T cells. Co-culture of huMNC2-CAR44 T cells with the cancer cells induced the CAR T cells to secrete large amounts of IFN-g and IL-2 into the surrounding media, yet co-culture with the MUC1 positive normal cells induced no secretion of the cytokines (FIG. 51 and FIG. 52). In addition to testing for IFN-g and IL-2 secretion by the CAR T cells, the normal cells were assayed for signs of cell death, which could have been induced by the CAR T cells if the antibody targeting head were not extremely cancer-specific. After co-culture with huMNC2-CAR44 T cells, the cells were incubated with a cell death marker, then assayed by FACS. huMNC2-CAR44 T cells induced no cell death in the normal cells (FIG. 53A-53J).

[0677] In addition to FACS analysis, many researchers now use an xCELLigence instrument to measure CAR T killing of cancer cells. FACS is not the best method for tracking T cell induced cell killing because the T cells lyse the target cell. By FACS it is difficult to measure dead cells because they are excluded as cell debris, so one must infer an amount of cell killing and by various methods determine if the missing cells are T cells or cancer cells.

[0678] The xCELLigence instrument uses electrode arrays upon which cancer cells are plated. The adherent cancer cells insulate the electrode and so cause an increase in impedance as they grow. Conversely, T cells are not adherent and remain in suspension so do not contribute to insulation of the electrode which would increase impedance. However, if the T cells or CAR T cells kill the cancer cells on the electrode plate, the cancer cells ball up and float off as they die, which causes the impedance to decrease. The xCELLigence instrument measures impedance as a function of time, which is correlated to cancer cell killing. In addition, the electrode plates also have a viewing window. When CAR T cells effectively kill the adsorbed target cancer cells, there is a decrease in impedance but also one can see that there are no cancer cells left on the plate surface.

[0679] FIGS. 55A-55H show the cytotoxic effect of huMNC2-CAR44 T cells on MUC1* positive DU145 prostate cancer cells as measured by a variety of assays. FIG. 55A is a fluorescent photograph of untransduced T cells co-cultured with the prostate cancer cells, wherein granzyme B is stained with a red fluorophore. FIG. 55C is a fluorescent photograph of huMNC2-CAR44 T cells co-cultured with the prostate cancer cells, wherein granzyme B is stained with a red fluorophore. FIG. 55D is the DAPI and granzyme B merge. FIG. 55E is a FACS scan for fluorescently labeled granzyme B for untransduced T cells incubated with the cancer cells. FIG. 55F is a FACS scan showing a positive increase in fluorescently labeled granzyme B for huMNC2-CAR44 T cells incubated with the cancer cells. FIG. 55G is a graph of the mean fluorescent intensity. FIG. 55H is an xCELLigence scan tracking the real-time killing of DU145 cancer cells by huMNC2-CAR44 T cells (blue trace) but not by untransduced T cells (green). FIGS. 56A-56H show the cytotoxic effect of huMNC2-CAR44 T cells on MUC1* positive CAPAN-2 pancreatic cancer cells as measured by a variety of assays. FIG. 56A is a fluorescent photograph of untransduced T cells co-cultured with the pancreatic cancer cells, wherein granzyme B is stained with a red fluorophore. FIG. 56B is the DAPI and granzyme B merge. FIG. 56C is a fluorescent photograph of huMNC2-CAR44 T cells co-cultured with the pancreatic cancer cells, wherein granzyme B is stained with a red fluorophore. FIG. 56D is the DAPI and granzyme B merge. FIG. 56E is a FACS scan for fluorescently labeled granzyme B for untransduced T cells incubated with the cancer cells. FIG. 56F is a FACS scan showing a positive increase in fluorescently labeled granzyme B for huMNC2-CAR44 T cells incubated with the cancer cells. FIG. 56G is a graph of the mean fluorescent intensity. FIG. 56H is an xCELLigence scan tracking the real-time killing of CAPAN-2 cancer cells by huMNC2-CAR44 T cells (blue trace) but not by untransduced T cells (green). FIGS. 57A-57C show xCELLigence scans tracking the real-time killing of MUC1* positive cancer cells, but not MUC1* negative cells, by huMNC2-CAR44 T cells. FIG. 57A shows that huMNC2-CAR44 T cells effectively kill HCT colon cancer cells that have been stably transfected with MUC1*. FIG. 57B shows that huMNC2-CAR44 T cells have almost no effect on HCT-MUC1-41TR, which is a MUC1 negative cancer cell that has been stably transfected with a MUC1 full-length. In this cell line only about 10% of the cell have MUC1 cleaved to MUC1*. FIG. 57C shows that huMNC2-CAR44 T cells have no effect on HCT-116 cells, which is a MUC1 negative colon cancer cell line.

[0680] These data demonstrate that T cells transduced with a CAR wherein the antibody fragment targeting head is MNC2, effectively kill MUC1* positive cancer cells. These data specifically show that huMNC2-scFV-CAR44 transduced into human T cells effectively kill MUC1* positive cancer cells. Because we and others have now demonstrated that the most important aspect of CAR T function is the targeting antibody fragment, it follows that an immune cell or a T cell transduced with any CAR having the antibody fragment MNC2-scFV or huMNC2-scFV would have similar efficacy against MUC1 or MUC1* positive tumors. For example, the hinge region that connects the scFv to the transmembrane portion could be any flexible linker. The intracellular co-stimulatory domains could be CD28-3zeta, CD28-4-1BB-3zeta or any combination of immune cell co-stimulatory domains.

[0681] FIG. 61 shows an experiment in which huMNC2-scFv-CAR44 transduced human T cell that were bead stimulated (Protocol 1) or cancer cell stimulated (Protocol 2) were tested for their ability to inhibit tumor growth in animals. Human cancer cells that had been stably transfected with Luciferase were injected into female NOD/SCID/GAMMA (NSG) mice between 11 and 15 weeks of age. 500,000 BT-20 breast cancer cells were injected sub-cutaneously into a rear flank. Tumor engraftment was verified by injecting the animals with Luciferin and then imaging the fluorescent cancer cells using an IVIS instrument. IVIS images taken Day 5 post implantation showed the presence of tumor cells. On Day 6 after IVIS measurement, animals were given a one-time injection of 10 million of either human T cells transduced with huMNC2-scFv-CAR44 or untransduced T cells. 5 million T cells were injected intra-tumor and 5 million were injected into the tail vein. 10 minutes prior to IVIS photographs, mice were IP injected with Luciferin, which fluoresces after cleavage by Luciferase, thus making tumor cells fluoresce. FIGS. 61A, 61D, 61G show photographs of mice that were treated with huMNC2-scFv-CAR44 T cells that had been pre-stimulated by co-culturing for 24 hours with 4 μm beads to which was attached a synthetic MUC1*, PSMGFR peptide 24 hours prior to administration, “Protocol 1”. FIGS. 61B, 61E, 61H show photographs of mice that were treated with huMNC2-scFv-CAR44 T cells that had been pre-stimulated by twice co-culturing for 24 hours with MUC1* positive cancer cells 24 hours prior to administration, “Protocol 2”. As can be seen in FIG. 61, huMNC2-CAR44 T cells that were peptide-bead stimulated inhibited tumor growth better than cells pre-stimulated by incubation with live cancer cells, which likely contaminated the target cells and increased the tumor volume.

[0682] huMNC2-scFv-CAR44 transduced human T cell that were bead stimulated (Protocol 1) or cancer cell stimulated (Protocol 2) were also tested for their ability to inhibit tumor growth in animals. Human cancer cells that had been stably transfected with Luciferase were injected into female NOD/SCID/GAMMA (NSG) mice between 11 and 15 weeks of age. In another experiment, 500,000 BT-20 MUC1* positive triple negative breast cancer cells were injected sub-cutaneously into a rear flank. Tumor engraftment was verified by injecting the animals with Luciferin and then imaging the fluorescent cancer cells using an IVIS instrument. IVIS images taken Day 6 post implantation showed the presence of tumor cells. On Day 6, after IVIS imaging, 10M huMNC2-scFv-CAR44 T cells were administered to the animals. 5M of the CAR T cells were administered by intratumor injection and the other 5M were administered by tail vein injection. Control group was injected by same administration routes with the same number of untransduced T cells. IVIS measurements of tumor burden were taken on Days 6, 8, and 12. As can be seen in FIGS. 61A-61J, both groups of mice treated with huMNC2-CAR44 T cells showed a decrease in tumor burden compared to the control group.

[0683] huMNC2-scFv-CAR44 transduced human T cell that were bead stimulated (Protocol 1) were also tested for their ability to inhibit ovarian cancer growth in animals. Human SKOV-3 MUC1* positive ovarian cancer cells that had been stably transfected with Luciferase were injected into female NOD/SCID/GAMMA (NSG) mice between 11 and 15 weeks of age. In one experiment, 500,000 SKOV-3 cancer cells were injected into the intraperitoneal cavity to mimic metastatic ovarian cancer in humans. Tumor engraftment was verified by injecting the animals with Luciferin and then imaging the fluorescent cancer cells using an IVIS instrument. IVIS images taken Day 3 post implantation showed the presence of tumor cells. On Day 4 and Day 11, post tumor implantation, 10M huMNC2-scFv-CAR44 T cells were IP administered to the animals. On Day 4, CAR T cells were IP injected. On Day 11 half the CAR T cells were injected into the intraperitoneal space and the other half was injected into the tail vein. Control groups were injected by same administration routes with either the same number of untransduced T cells or same volume of PBS. Subsequent IVIS measurements of tumor burden were taken on Day 7, Day 10 and Day 15. As can be seen in FIGS. 62A-62L, control mice have tumors that are growing at a much faster rate than the huMNC2-CAR44 T cell treated mice. FIG. 62M shows the IVIS color bar correlating photons/second to color.

[0684] One aspect of the invention is a method for treating a patient diagnosed with, suspected of having, or at risk of developing a MUC1 positive or MUC1* positive cancer, wherein the patient is administered an effective amount of an antibody, antibody fragment which may be incorporated into a BiTE, a bispecific antibody, a multi-specific antibody, an ADC or a CAR expressed in an immune cell wherein the antibody or fragment thereof is derived from an antibody of the invention. In a preferred embodiment, the antibody or fragment thereof is derived from MNC2, MNE6, 20A10, 3C2B1, 5C6F3 or 25E6.

[0685] One aspect of the invention is a method for treating a patient diagnosed with, suspected of having, or at risk of developing a MUC1 positive or MUC1* positive cancer, wherein the patient is administered an effective amount of immune cells that have been transduced with a MUC1* targeting CAR, wherein the CAR is chosen from among the group consisting of MNE6-CD8-CD28-3z (SEQ ID NOS:297-298); MNE6-CD4-CD28-3z (SEQ ID NOS:748-749); MNE6-CD8-41BB-3z (SEQ ID NOS:300-301); MNE6-CD4-41BB-3z (SEQ ID NOS:750-751); MNE6-CD8-CD28-41BB-3z (SEQ ID NOS:303-304); MNE6-CD4-CD28-41BB-3z (SEQ ID NOS:754-755); MNE6scFv-Fc-8-41BB-CD3z (SEQ ID NOS:310-311); MNE6scFv-IgD-Fc-8-41BB-CD3z (SEQ ID NOS:770-771); MNE6scFv-FcH-8-41BB-CD3z (SEQ ID NOS:315-316); MNE6scFv-IgD-FcH-8-41BB-CD3z (SEQ ID NOS:772-773); MNE6scFv-Fc-4-41BB-CD3z (SEQ ID NOS:318-319); MNE6scFv-FcH-4-41BB-CD3z (SEQ ID NOS:321-322); MNE6scFv-IgD-8-41BB-CD3z (SEQ ID NOS:323-324); MNE6scFv-IgD-4-41BB-CD3z (SEQ ID NOS:327-328); MNE6scFv-X4-8-41BB-CD3z (SEQ ID NOS:330-331); MNE6scFv-X4-4-41BB-CD3z (SEQ ID NOS:333-334); MNE6scFv-8-4-41BB-CD3z (SEQ ID NOS:336-337), or any of the aforementioned CARs wherein the MNE6 is replaced by fragment derived from MNC2, MNE6, 20A10, 3C2B1, 5C6F3, 25E6, 18G12, 28F9, 1E4, B12, B2, B7, B9, 8C7F3, or H11. Another aspect of the invention is a method for treating a patient diagnosed with, suspected of having, or at risk of developing a cancer, wherein the patient is administered an effective amount of immune cells that have been transduced with one of the aforementioned CARs wherein the MNE6 is replaced by a peptide comprising antibody variable domain fragments that are specific for a cancer antigen. In any of the above methods, the immune cell may be a T cell and may further be isolated from the patient to be treated. Alternatively, the immune cell, which may be a T cell is isolated from a donor. In yet another aspect, the immune cell is derived from a stem cell that has been directed to differentiate to that immune cell type in vitro. In another aspect, a CAR containing sequences of the antibody are expressed in a stem cell, which then may be differentiated into an immune cell. In one case, the immune cell is a T cell. In another case, the immune cell is an NK cell.

[0686] Another aspect of the invention is a method for treating a patient diagnosed with, suspected of having, or at risk of developing a MUC1 positive or MUC1* positive cancer, wherein the patient is administered an effective amount of immune cells that have been transduced with a MUC1* targeting CAR. In a preferred embodiment, the CAR may include a single chain antibody fragment, scFv, comprising a sequence derived from antibody MNC2, such as MNC2-scFv (SEQ ID NO:239, 241, 243, or 654-655), from antibody 20A10, such as SEQ ID NO:1574-1581 or 5001-5012, from antibody 3C2B1, such as SEQ ID NO:1572-1573, which may be humanized for example as in SEQ ID NO:1812-1813, or from antibody 5C6F3, such as SEQ ID NO:1384-1385), which may be humanized for example as in SEQ ID NO:1814-1815, or from antibody 25E6 such as SEQ ID NO:1598-1599 or 1600-1601, wherein the hinge and transmembrane sequences may be derived from CD8 (SEQ ID NO:346 and SEQ ID NO:364), or from CD28 (SEQ ID NO:350 and SEQ ID NO:368), further comprising a co-stimulatory domain, which may be 41BB (SEQ ID NO:659) or CD28 (SEQ ID NO:378) and the CD3-zeta signaling domain may be derived from (SEQ ID NO:661) or may contain mutations including those referred to as 1XX (SEQ ID NO:1796-1797).

### Other MUC1 Cleavage Sites

[0687] It is known that MUC1 is cleaved to the growth factor receptor form, MUC1*, on some healthy cells in addition to cancer cells. For example, MUC1 is cleaved to MUC1* on healthy stem and progenitor cells. A large percentage of bone marrow cells are MUC1* positive. Portions of the intestine are MUC1* positive.

[0688] The inventors have discovered that MUC1 can be cleaved at different positions that are relatively close to each other but the location of cleavage changes the fold of the remaining portion of the extracellular domain. As a result, monoclonal antibodies can be identified that bind to MUC1* cleaved at a first position but do not bind to MUC1* that has been cleaved at a second position. This discovery is disclosed in WO2014/028668, filed Aug. 14, 2013, the contents of which are incorporated by reference herein its entirety. We identified a set of anti-MUC1* monoclonal antibodies that bind to MUC1* as it appears on cancer cells but do not bind to MUC1* as it appears on stem and progenitor cells. Conversely, we identified a second set of monoclonal antibodies that bind to stem and progenitor cells but do not bind to cancer cells. One method used to identify stem specific antibodies is as follows: supernatants from monoclonal hybridomas were separately adsorbed onto 2 multi-well plates. Stem cells, which are non-adherent cells, were put into one plate and cancer cells which are adherent were put into an identical plate. After an incubation period, the plates were rinsed and inverted. If the non-adherent stem cells stuck to the plate, then the monoclonal antibody in that particular well recognizes stem cells and will not recognize cancer cells. Antibodies that did not capture stem cells or antibodies that captured cancer cells were identified as cancer specific antibodies. FACS analysis has confirmed this method works.

[0689] Antibodies MNE6 and MNC2 are examples of cancer-specific antibodies. Antibodies MNC3 and MNC8 are examples of stem-specific antibodies. Although both sets of antibodies are able to bind to a peptide having the PSMGFR sequence, FACS analysis shows that the anti-MUC1* polyclonal antibody and MNC3 bind to MUC1* positive bone marrow cells but MNE6 does not. The MUC1* polyclonal antibody was generated by immunizing a rabbit with the PSMGFR peptide. Similarly, MNC3 binds to stem cells of the intestinal crypts but MNE6 does not. Conversely, MNE6 antibody binds to cancerous tissue while the stem-specific MNC3 does not. Competition ELISA experiments indicate that the C-terminal 10 amino acids of the PSMGFR peptide are required for MNE6 and MNC2 binding, but not for MNC3 and MNC8. Therefore, another method for identifying antibodies that are cancer specific is to immunize with a peptide having the sequence of the PSMGFR peptide minus the 10 N-terminal amino acids or use that peptide to screen for antibodies or antibody fragments that will be cancer specific. Antibodies that bind to a peptide with a sequence of PSMGFR peptide minus the N-terminal 10 amino acids, referred to herein as N-10 peptide, but do not bind to a peptide with a sequence of PSMGFR peptide minus the C-terminal 10 amino acids, C-10 peptide, are cancer specific antibodies for use in the treatment or prevention of cancers.

[0690] The extracellular domain of MUC1 is also cleaved on stem cells and some progenitor cells, where activation of cleaved MUC1 by ligands NME1 in dimer form or NME7 promotes growth and pluripotency and inhibits differentiation. The transmembrane portion of MUC1 that remains after cleavage is called MUC1* and the extracellular domain is comprised essentially of the Primary Sequence of MUC1 Growth Factor Receptor (PSMGFR) sequence. However, the exact site of cleavage can vary depending on cell type, tissue type, or which cleavage enzyme a particular person expresses or overexpresses. In addition to the cleavage site that we previously identified which leaves the transmembrane portion of MUC1* comprising most or all of the PSMGFR (SEQ ID NO:2), other cleavage sites could possibly result in an extended MUC1* comprised of most or all of SNIKFRPGSVVVQLTLAFREGTINVHDVETQFNQYKTEAASRY (SEQ ID NO:620); or

[0691] SVVVQLTLAFREGTINVHDVETQFNQYKTEAASRY (SEQ ID NO:621).

[0692] To test this hypothesis, and to determine if antibodies to an N-terminally extended PSMGFR, would generated more cancer-specific antibodies than antibodies that bind to the PSMGFR, we generated monoclonal antibodies by immunization with peptides:

(PSMGFR)
(SEQ ID NO: 2)
GTINVHDVETQFNQYKTEAASRYNLTISDVSVSDVPFPFSAQSGA,
(N + 20/C − 27)
(SEQ ID NO: 822)
SNIKFRPGSVVVQLTLAFREGTINVHDVETQFNQYKTE,
or
(N + 9/C − 9)
(SEQ ID NO: 824)
VQLTLAFREGTINVHDVETQFNQYKTEAASRYNLTISDVSVSDVP

[0693] Monoclonal antibodies generated from immunization with the same peptide can also show differences in reactivity to the same cancerous tissue specimen. These results indicate that the monoclonal antibodies recognize different conformations of the truncated MUC1 extra cellular domain produced by immunizing with different length peptides, mimicking different cleavage sites, or from cleavage at different sites in the host animal. Antibodies that recognize different cleavage site conformations may be cancer sub-type specific or patient specific, depending on which cleavage enzyme their tumor expresses. In one aspect of the invention, a patient diagnosed with a certain type of cancer is treated with an antibody of the invention that recognizes a cleaved MUC1 wherein the antibody is specific for cleavage by a specific enzyme that is known to be typically expressed by that sub-type of cancer. In another aspect, a patient tumor is analyzed to determine which enzyme his or her tumor expresses and an antibody that recognizes a MUC1 cleaved by that enzyme is then administered to the patient for the treatment of their cancer. The antibody may be in the form of a CAR, a BiTE, an ADC, a bispecific antibody, with or without an FC region or a portion of an Fc region, a bi-scFv, a di-scFv, a tandem di-scFv, a diabody, triabody, tribody, tetrabody and other antibody-like molecules that are multi-valent and multi-specific.

[0694] We previously reported that it is the MUC1 transmembrane cleavage product, called MUC1* (muk1 star), that mediates tumor growth and not full-length MUC1 (Mahanta et al 2008). MUC1* is a growth factor receptor that is activated by ligand induced dimerization of its short extra cellular domain (FIG. 1A). Dimerization of the MUC1* extra cellular domain activates the MAP kinase signaling cascade and stimulates growth and survival of cancer cells (Fessler et al 2009). Bivalent antibodies that dimerize the MUC1* extra cellular domain stimulate cancer cell growth while the monovalent Fab of the same antibody, which cannot dimerize, inhibits cancer cell growth. We demonstrated this in vitro (FIG. 1B) and in vivo (FIG. 7A-7B).

[0695] We then identified the natural ligands that dimerize and activate MUC1* growth factor receptor function. Dimers of NME1 bind to and dimerize the MUC1* extra cellular domain and stimulate growth (FIG. 1C and Smagghe et al 2013). NME1 can turn its growth factor properties off NME1 is secreted by MUC1* positive cells. Dimeric NME1 binds to MUC1* to stimulate growth. However, as the cell population grows, more and more NME1 is secreted from the cells. At high concentrations, the NME1 dimers multimerize and form hexamers, which do not bind to MUC1*, but likely bind to some unknown receptor, as the addition of NME1 hexamers turns off growth. NME1 is an adult form. The embryonic form is NME7_{AB} (Carter et al 2016). Each NME7A monomer has two binding sites for MUC1* so as a monomer it dimerizes MUC1* (FIG. 1D), stimulates growth and cannot turn itself off. In the developing embryo, BRD4 turns off NME7 and its co-factor JMJD6 turns on the self-regulating form, NME1. However, in cancers, NME7, which should be silenced in adult life, is aberrantly expressed again, where is renders the MUC1* growth factor receptor constitutively active.

[0696] In vitro, NME1 (SEQ ID NO:4) and NME7A (SEQ ID NO:827) bind to the PSMGFR portion of the MUC1* extra cellular domain. Both growth factors can bind to the PSMGFR peptide (SEQ ID NO:2) even if the 10 N-terminal amino acids are deleted, referred to herein as N-10 (SEQ ID NO:3). However, neither NME1 nor NME7A can bind to the PSMGFR peptide if the 10 membrane proximal amino acids are deleted (FIG. 2A-2D), referred to herein as C-10 (SEQ ID NO:825). In summary, the epitope to which NME1 and NME7A bind includes all or part of the 10 membrane proximal amino acids: PFPFSAQSGA (SEQ ID NO:1743). We tested various antibodies that were generated in animals by immunizing with the PSMGFR peptide for their ability to recognize cancer cells but not healthy cells. Among the most cancer selective were the MNC2 and MNE6 monoclonal anti-MUC1* antibodies. Two other monoclonal antibodies that were generated from immunizing animals with the PSMGFR peptide are MNC3 and MNC8. Although MNC2, MNE6, MNC3 and MNC8 all bind to the PSMGFR peptide, like NME1 and NME7_{AB}, MNC2 and MNE6 bind strongly to the N-10 peptide but not to the C-10 peptide (FIG. 2B-2C). In fact, MNC2 and MNE6 competitively inhibit the binding of NME1 and NME7_{AB} to PSMGFR (FIG. 3A-3C). Conversely, MNC3 and MNC8 bind to the C-10 peptide, bind less well to the N-10 peptide and do not compete with NME1 nor NME7A for binding to MUC1* peptides, including PSMGFR (FIG. 2E-2F). MNC3 and MNC8 are far less cancer specific than MNC2 and MNE6. MNC3 and MNC8 recognize stem and progenitor cells, such as hematopoietic stem cells, whereas MNC2 and MNE6 do not (FIG. 39-41). Because hematopoietic stem cells are the progenitor cells for the blood cells, it would be problematic to have a cancer therapeutic that would also target such an important normal cell type.

[0697] Because MUC1* is generated by enzymatic cleavage of MUC1, we researched which cleavage enzymes cleave MUC1 to a MUC1* and whether or not we could identify antibodies that would recognize a MUC1* generated by a first cleavage enzyme but not MUC1* generated by a second cleavage enzyme. We found that MNC2 and MNE6 recognized a MUC1* generated by cleavage of MUC1 by MMP9 but not by cleavage by other enzymes such as MMP2 (FIG. 37 and FIG. 75). We note that MMP9 is overexpressed in cancers and is a predictor of poor prognosis (vant Veer et al 2002; Dufour et al 2011) and has been implicated in metastasis (Owyong et al, 2019), whereas MMP2 is expressed in bone marrow. One antibody binding to a MUC1* generated by cleavage by a first enzyme but not by cleavage by a second enzyme implies that the antibody recognizes a conformational epitope rather than a linear epitope.

[0698] We reasoned that the most cancer specific antibodies would be those antibodies that are characterized by some combination of most or all of the following:
[0699] (i) Antibody binds to PSMGFR peptide;
[0700] Antibody does not bind to full-length MUC1;
[0701] (ii) Antibody binds to N-10;
[0702] (iii) Antibody does not bind to C-10;
[0703] (iv) Antibody competitively inhibits binding of NME1 or NME7_{AB} to MUC1* extra cellular domain or a PSMGFR peptide;
[0704] (v) Antibody recognizes a MUC1* generated by cleavage by MMP9;
[0705] (vi) Antibody recognizes a conformational epitope not a linear epitope.

### MNC2 and MNE6 are Cancer Specific

[0706] Our experiments show that both MNC2 and MNE6: a) Bind to tumor cells; b) monovalent forms block tumor growth in vitro and in vivo; c) have minimal to no binding of normal tissue while having robust binding to a wide panel of tumor tissues; d) when incorporated into CAR T cells, MNC2 and MNE6 directed CAR T cells do not recognize full-length MUC1 and do not kill cells that only express full-length MUC1; e) MNC2 and MNE6 directed CAR T cells cluster then kill tumor cells expressing MUC1*; and f) MNC2 and MNE6 recognize a MUC1 cleavage product when it is cleaved by MMP9.

[0707] MNC2 directed CAR T cells do not recognize normal, healthy cells that are MUC1* positive. A panel of normal cell lines, as well as primary cells, were co-cultured with huMNC2-CAR44 T cells. The normal cell populations were analyzed to determine whether or not the MNC2 directed CAR T cells killed them. The CAR T cells were analyzed to see if co-culture with the MUC1 positive normal cells activated the killing function of the CAR T cells, as measured by secretion of IL-2 or interferon gamma. As FIGS. 50-52 show, the MNC2 directed CAR T cells did not kill the normal cells, nor was there cytokine secretion, indicative of T cell activation. In addition, over 2,000 human tissue specimens were analyzed. The results showed that neither MNC2 nor MNE6 showed any significant binding to normal tissues but showed robust staining of a wide panel of cancerous tissues. For example, MNC2 stained 93% breast cancer specimens, 83% ovarian, 78% pancreatic and 71% lung cancer specimens. In addition, patient-matched primary tumors (FIG. 54) and subsequent metastases showed that the amount of MNC2-reactive MUC1* increased with tumor progression and metastases. In summary, MNC2 is a highly cancer specific antibody.

### Characterization of MNC2 and MNE6

[0708] Our gold standard, cancer-specific antibodies MNC2 and MNE6: 1) bind to N-10 peptide but not to the C-10 peptide; 2) compete with NME7_{AB} and dimeric NME1 for the same binding site near the C-terminus of the PSMGFR peptide, which is the membrane proximal portion of MUC1* on cells; 3) do not work in a Western blot assay indicating that they recognize a conformational rather than linear epitope; 4) recognize a MUC1* generated when MUC1 is cleaved by MMP9; 5) do not bind to full-length MUC1 but only to the cleaved form, MUC1*, in model cell lines as well as cancer cell lines; 6) show little to no binding to normal tissues but robustly stain a wide variety of tumor tissues; and 7) share some consensus sequences in their Complementarity Determining Regions, CDRs.

[0709] In an effort to identify other antibodies that are highly cancer-specific, like MNC2 and MNE6, we subjected new antibodies to a set of seven (7) characterization experiments: 1) epitope binding assays; 2) functional assays such as the ability to displace activating growth factor NME7_{AB} or dimeric NME1 from binding to MUC1* peptides PSMGFR or N-10; 3) Western blots to determine whether or not the antibodies recognized a linear epitope versus a conformational epitope, in which case the antibodies would not work in a Western; 4) binding assays to see if the antibodies recognized a cleaved MUC1 that was dependent on cleavage by MMP9; 5) FACS analysis to measure the ability of the antibodies to recognize MUC1* positive cells but not full-length MUC1; and FACS analysis to measure the ability of the antibodies to recognize MUC1/MUC1* positive cancer cells; 6) immunohistochemistry, IHC, assays of normal tissues versus cancerous tissues to determine true cancer specificity; and 7) aligning antibody sequences to determine if subsets of antibodies shared consensus sequences that could predict their cancer specificity or lack thereof.

[0710] Monoclonal antibodies were produced by immunizing animals with peptides derived from a MUC1 that is devoid of tandem repeats. These antibodies included PSMGFR and peptides that were extended at the N-terminus of PSMGFR. Immunizing peptides were:
[0711] PSMGFR (SEQ ID NO:2))
[0712] N+9/C-9 (9 amino acids added onto the N-terminus and 9 amino acids deleted from the C-terminus) (SEQ ID NO:824)
[0713] N+20/C-27 (20 amino acids added onto the N-terminus and 27 amino acids deleted from the C-terminus) (SEQ ID NO:823)

[0714] These monoclonal antibodies were then tested to determine which satisfied the seven (7) characterization criteria cited above, which we reasoned would identify the most cancer specific antibodies.

### Epitope Binding Assays

[0715] ELISA assays were performed to determine if, in addition to recognizing their immunizing peptide, they recognized PSMGFR, N-10 or C-10. In addition, they were tested for their ability to bind to N+20/C-27, N+9/C-9. We first did the ELISA assay on our set of reference antibodies, MNC2, MNE6, which we know are cancer-specific plus MNC3, which we know recognizes stem cells and progenitor cells (FIG. 63A-63B). None of the reference antibodies bound to the N+20/C-27 peptide. MNC2 and MNE6 cannot bind to PSMGFR peptides with 27, 10 or 9 C-terminal deletions, however, MNC3 binds to C-10 and to N+9/C-9 peptides.

[0716] This same ELISA assay was performed on the antibodies of the invention (FIGS. 64-66 and FIG. 201). The binding patterns of the antibodies that were generated by immunizing with the PSMGFR peptide are shown in FIGS. 64A-64B. Note that only 20A10 exactly matches the binding profile of MNC2 and MNE6. 25E6, 28F9 and 18G12 are all able to bind to the N-10 peptide. 18B4 is the only antibody raised against the PSMGFR peptide that requires the 10 most N-terminal amino acids of the peptide. The color of the bars for each antibody in the ELISA graph are color coded to match the deductive cognate sequence, or a portion thereof, of that antibody. In addition, another set of antibodies was assayed by ELISA (FIG. 201). Of this set, B12, B2, B7, B9, 8C7F3, and H11 bound to the PSMGFR peptide, bound to the N-10 peptide, but not to the C-10 peptide (FIG. 201). The binding patterns of the antibodies that were generated by immunizing with the N+20/C-27 peptide are shown in FIG. 65A-65B. Although these antibodies were raised against the N+20/C-27 peptide, all but one, 45C11, still bind to the PSMGFR peptide, albeit at the N-terminal portion of PSMGFR. The binding of 45C11 is weak but deductive reasoning shows that all or some of the cognate epitope must lie within SNIKFRPGSVV (SEQ ID NO:1744).

[0717] Of the antibodies generated by immunizing with the N+9/C-9 peptide, 8A9 and 17H6 do not bind to the PSMGFR peptide, so must bind to the 9 additional N-terminal amino acids. Antibodies 3C5 and 39H5 appear to bind to the 10 most N-terminal amino acids of the PSMGFR peptide.

[0718] In order to further refine the epitopes to which each antibody binds, a series of smaller peptides derived from the PSMGFR sequence were synthesized: N-30 (SEQ ID NO:7), N-26 (SEQ ID NO:6), N-19 (SEQ ID NO:4), N-10/C-5 (SEQ ID NO:8), N-19/C-5 (SEQ ID NO:9). Each of the antibodies was tested in an ELISA assay for their ability to bind to this refined set of peptides, plus PSMGFR, N-10 and C-10 peptides (FIG. 67-69).

[0719] In FIG. 67A-67D, antibodies generated by immunization with the PSMGFR peptide were assayed. As can be seen in the figure, amino acids ASRYNLT (SEQ ID NO: 1745), which are essentially in the middle of the PSMGFR peptide, are important or essential for the binding of 28F9, 18G12, 25E6, and MNC3 antibodies. Amino acids GTINVHDVET (SEQ ID NO:1746), which comprise the most N-terminal part of the PSMGFR peptide are important or essential for the binding of the 18B4 antibody. Amino acids FPFS (SEQ ID NO:1747) are important or essential for the binding of 20A10, MNC2 and MNE6. We note that these three antibodies recognize a conformational epitope, not a linear epitope. Because the proline in the FPFS sequence significantly alters the conformation of nearby portions of the PSMGFR peptide, it is also possible that the antibodies do not bind directly to these four amino acids, but that the absence of the proline alters the fold of the remaining peptide such that the conformation to which 20A10, MNC2 and MNE6 bind, is no longer present.

[0720] In FIG. 68A-68D, antibodies generated by immunization with the N+20/C-27 peptide were assayed. As can be seen in the figure, amino acids GTINVHDVET, which comprise the most N-terminal part of the PSMGFR peptide are important or essential for the binding of the 29H1, 32C1, and 31A1 antibodies. Amino acids SNIKFRPGSVVVQLTLAFRE (SEQ ID NO:1748), which is 20 additional amino acids N-terminal to the PSMGFR peptide and outside of the PSMGFR peptide, are important or essential for the binding of antibody 45C11. However, referring back to FIG. 65, antibody 45C11 was not able to bind to the N+9/C-9 peptide, therefore we conclude that amino acids within the SNIKFRPGSVV sequence are essential for the binding of 45C11. Amino acids QFNQYKTEA (SEQ ID NO:1749), which are still within the sequence of PSMGFR, are important or essential for the binding of antibody 1E4.

[0721] In FIG. 69A-69D, antibodies generated by immunization with the N+9/C-9 peptide were assayed. As can be seen in the figure, amino acids GTINVHDVET, which comprise the most N-terminal part of the PSMGFR peptide are important or essential for the binding of the 39H5 and 3C5 antibodies. As can be seen in the figure, amino acids VQLTLAFRE (SEQ ID NO: 1750), which is 9 additional amino acids N-terminal to the PSMGFR peptide and outside of the PSMGFR peptide, are important or essential for the binding of antibodies 17H6 and 8A9. Because the 17H6 and 8A9 antibodies do not bind to any of the smaller peptides shown in this figure, refer to FIG. 66A-66C, which shows that these two antibodies only bind to the peptide that has 9 additional amino acids N-terminal to the PSMGFR peptide.

[0722] Table 2 below lists antibodies of the invention and their cognate epitopes.

TABLE 2

| Immunizing | Antibody | Cognate |
|---|---|---|
| Peptide | Name | Sequence |
| PSMGFR | MNC2 | FPFS or PFPFSAQSGA |
| | MNE6 | FPFS or PFPFSAQSGA |
| | 20A10 | FPFS or PFPFSAQSGA |
| | 3C2B1 | FPFS or PFPFSAQSGA |
| | 5C6F3 | SVSDV |
| | MNC3 | ASRYNLT |
| | 25E6 | ASRYNLT |
| | 28F9 | ASRYNLT |
| | 18G12 | ASRYNLT |
| | 18B4 | GTINVHDVET |
| N + 20/C − 27 | 45C11 | SNIKFRPGSVV |
| | 29H1 | GTINVHDVET |
| | 32C1 | GTINVHDVET |
| | 31A1 | GTINVHDVET |
| | 1E4 | QFNQYKTEA |
| N + 9/C − 9 | 17H6 | VQLTLAFRE |
| | 8A9 | VQLTLAFRE |
| | 39H5 | GTINVHDVET |
| | 3C5 | GTINVHDVET |

### Ability to Displace NME7_{AB} Binding to the MUC1* Extra Cellular Domain Peptide PSMGFR

[0723] We previously reported that dimeric NME1 dimerizes MUC1* extra cellular domain and stimulates growth. Monomeric NME7_{AB} has two binding sites for MUC1* so that as a monomer it dimerizes MUC1* and mediates cancer cell growth. We showed that NME1 and NME7_{AB} can bind to the MUC1* extra cellular domain. In vitro, NME1 and NME7_{AB} bind to the PSMGFR peptide even if the 10 N-terminal amino acids are deleted, referred to herein as N-10 (SEQ ID NO:3). However, neither NME1 nor NME7_{AB} can bind to the PSMGFR peptide if the 10 membrane proximal amino acids are deleted, referred to herein as C-10 (SEQ ID NO:825). In summary, the epitope to which NME1 and NME7_{AB} bind includes all or part of the 10 membrane proximal amino acids: PFPFSAQSGA (SEQ ID NO: 1743). We tested various antibodies that were generated in animals by immunizing with the PSMGFR peptide for their ability to recognize cancer cells but not healthy cells. Among the most cancer selective were the MNC2 and MNE6 monoclonal anti-MUC1* antibodies. Two other monoclonal antibodies that were generated from immunizing animals with the PSMGFR peptide are MNC3 and MNC8. Although MNC2, MNE6, MNC3 and MNC8 all bind to the PSMGFR peptide, like NME1 and NME7a, MNC2 and MNE6 bind strongly to the N-10 peptide but not to the C-10 peptide. In fact, MNC2 and MNE6 competitively inhibit the binding of NME1 and NME7A to PSMGFR. Conversely, MNC3 and MNC8 are able to bind to the C-10 peptide, bind less well to the N-10 peptide and do not compete with NME1 nor NME7A for binding to MUC1* peptides, including PSMGFR (FIG. 70). MNC3 and MNC8 are less cancer specific than MNC2 and MNE6. MNC3 and MNC8 recognize stem and progenitor cells, such as hematopoietic stem cells, whereas MNC2 and MNE6 do not. Because hematopoietic stem cells are the progenitor cells for the blood cells, it would be problematic to have a cancer therapeutic that would also target such an important normal cell type.

[0724] In this experiment, antibodies of the invention were tested for their ability to displace NME7A from binding to the PSMGFR peptide. In this experiment, a multi-well plate was coated with the PSMGFR peptide. Recombinant NME7A was allowed to bind to the surface-immobilized PSMGFR peptide. Wash steps followed. Various antibodies were added, followed by wash steps. The amount of NME7A that remained attached to the PSMGFR coated plate, after antibody competition, was measured by detecting a tag on the NME7A. As a control, anti-NME7A antibodies were also tested for their ability to displace NME7A from the PSMGFR. FIG. 70 shows a graph of an ELISA displacement assay. The bar graph is color coded to indicate the cognate epitope to which each antibody binds. As can be seen in the figure, the antibodies that bind to the more C-terminal portions of PSMGFR are the most potent at disrupting the binding of onco-embryonic growth factor NME7A to the MUC1* extra cellular domain or the PSMGFR peptide. The rank order of potency for disrupting binding of NME7_{AB} to PSMGFR according to their cognate epitope is as follows: FPFS>ASRYNLT>QFNQYKTEA>GTINVHDVET. Antibodies that bind to epitopes outside of the PSMGFR peptide, such as 45C11, 8A9 and 17H6 did not compete with NME7_{AB} for binding.

### Western Blot Assay to Determine Linear Versus Conformational Cognate Epitope

[0725] Antibodies were tested to determine whether they recognize a linear or a conformational epitope. Only antibodies that recognize a linear epitope work in Western blots when using denaturing gels. For comparison, known antibodies were tested for their ability to bind to HCT-116, a MUC1 negative cancer cell line, HCT-MUC1-18, which is a cleavage resistant clone of HCTs transfected with full-length MUC1, and HCTs transfected with MUC1*, wherein the extra cellular domain comprises only the PSMGFR sequence. The antibodies tested for comparison are MNC2 and MNE6, which were known to only recognize a conformational epitope, SDIX which is a polyclonal antibody raised against PSMGFR and VU4H5, which is a commercially available monoclonal antibody that recognizes the tandem repeats of full-length MUC1 (FIG. 71A-71D). As can be seen, neither MNC2 nor MNE6 recognize a MUC1 or MUC1* specific linear epitope. FIGS. 71A and 71E show that antibody 20A10 also does not recognize a MUC1 or MUC1* specific linear epitope. The SDIX polyclonal antibody recognizes HCT-MUC1* but not full-length MUC1 and VU4H5 only recognizes full-length MUC1. These same antibodies were also tested for their ability to work in Western blots of two breast cancer cell lines 1500, aka Zr-75-1, and T47D cells and show the same binding pattern (FIG. 71E-71H).

[0726] Antibodies that were raised against the PSMGFR peptide were tested the same way in Western blots (FIG. 72A-72P). As can be seen, antibodies 25E6 and 18B4 recognize linear epitopes but 20A10 (FIG. 72A; 72I), 3C2B1 (FIG. 72F; 72N), 5C6F3 (FIG. 72G; 72O), 18G12 and 28F9 do not, indicating that they bind to a conformational epitope. Antibodies that were raised against the N+20/C-27 peptide were tested the same way in Western blots (FIG. 73A-73J). As can be seen, antibodies 31A1 and 32C1 recognize linear epitopes. Antibodies 1E4 and 45C11 may recognize a conformational epitope. Antibodies that were raised against the N+9/C-9 peptide were tested the same way in Western blots (FIG. 74A-74H). As can be seen, none of these antibodies recognize linear MUC1 or MUC1* specific epitopes. These antibodies may recognize a conformational epitope. However, an alternative interpretation is that the lack of binding in a Western blot means that they do not specifically recognize MUC1 or a MUC1 cleavage product or that the concentration used in this assay was insufficient.

Recognition of a MUC1 Cleavage Product after Cleavage by MMP9

[0727] We previously demonstrated that MNC2 recognizes a MUC1* that is generated when full-length MUC1 is cleaved by matrix metalloprotease 9, MMP9 (FIG. 37). MMP9 is expressed by tumor tissues and is a predictor of poor prognosis for breast cancers (vant Veer et al 2002; Dufour et al 2011). MMP9 has also been implicated in metastasis (Owyong et al 2019). Recall also that MNC2 competitively inhibits the binding of onco-embryonic growth factor NME7_{AB} to the MUC1* extra cellular domain (FIG. 3). Therefore, it follows that onco-embryonic growth factor, which activates growth and survival functions of MUC1*, also recognizes a MUC1* generated by cleavage by MMP9. It then follows that the most cancer specific antibodies are those that recognize a conformational epitope formed when MUC1 is cleaved to MUC1* by MMP9.

[0728] Antibodies generated by immunization with PSMGFR, N+20/C-27, or N+9/C-9 were tested for their ability to recognize MUC1 after it is cleaved by MMP9. To do this, we transfected HCT-116, a MUC1 negative colon cancer cell line, with full-length MUC1 and isolated a single cell clone that is cleavage resistant; this cleavage resistant cell line is called HCT-MUC1-18. To HCT-MUC1-18 cells was added either a catalytically active MMP9 or MMP2. The enzymes, added over a range of concentrations, were incubated with the cells for 24 hours. The resultant cells were then incubated with the various antibodies and analyzed by FACS to determine which bound to a MUC1 cleavage product produced by cleavage by MMP9 (FIG. 75A-75N). Note that the first bar of each graph shows that none of the antibodies binds to full-length MUC1 in the absence of cleavage. Each bar graph is labeled with both the name of the antibody used in that assay and its cognate epitope. The order of the graphs from right to left corresponds to the distance from the cell surface of the antibody's cognate epitope. The antibodies that bind to the more C-terminal epitopes within PSMGFR peptide, such as 20A10 (FIG. 75E), 3C2B1 (FIG. 75O) and 5C6F3 (FIG. 75P), showed a concentration dependent increase in the binding to a MUC1 cleavage product after cleavage by MMP9 but not MMP2. Antibody 45C11, which binds to the SNIKFRPGSVV epitope, which is outside of the PSMGFR portion of MUC1, does not recognize a MUC1 cleavage product after cleavage by MMP9 or MMP2 (FIG. 75K). Similarly, antibodies 8A9 and 17H6 bind to the VQLTLAFRE epitope, which is also outside of the PSMGFR sequence, and they do not bind to a MUC1 cleaved by MMP9 or MMP2. This result is consistent with the idea that MMP9 cleaves MUC1 such that the extra cellular domain of the remaining transmembrane cleavage product comprises essentially the amino acids of the PSMGFR peptide. For the greatest degree of cancer specificity, the antibody should recognize a conformational epitope of a MUC1 cleavage product created when MUC1 is cleaved by MMP9. Of the antibodies shown in FIG. 75A-75N, only 20A10 recognizes the MUC1 cleavage product produced by cleavage by MMP9 and also does not work in a Western blot, indicating it recognizes a conformational epitope, as do MNC2 and MNE6. Cleavage and release of the massive tandem repeat domain of MUC1 unmasks the ectopic binding site on MUC1*; linear epitopes will be unmasked in addition to conformational epitopes.

### FACS Analysis of Binding to a Panel of Cancer Cell Lines

[0729] Fluorescence Activated Cell Sorting, FACS, was performed on reference antibodies as well as new antibodies of the invention. FACS analyses of reference antibodies MNC2, “C2”, and VU4H5 binding to either the MUC1-negative cell line HCT-116, HCTs transfected with MUC1*, “HCT-MUC1*”, a cleavage resistant single cell clone of HCTs transfected with MUC1 full-length, “HCT-MUC1-18”, and MNC2 binding to breast cancer cells line T47D or breast cancer cell line 1500 also known as ZR-75-1, was performed (FIG. 76A-76J). This analysis shows that MNC2 binds to an ectopic binding site on the extra cellular domain of MUC1*, which is only available after cleavage and release of the bulk of the extra cellular domain comprising the tandem repeat domain. VU4H5 binds to hundreds of repeating epitopes in the tandem repeat domain of full-length MUC1 and does not bind to MUC1*. Although we know that cancer cell lines express both full-length MUC1 and MUC1*, antibodies against full-length MUC1 have, as yet, been shown to have no therapeutic value. Stimuvax, ImMucin, IMGN242, SAR566658, PankoMab and AS1402 were all antibodies that bound to full-length MUC1 and all failed to show efficacy in clinical trials. MUC1*, and not full-length MUC1, is a potent growth factor receptor that mediates the growth of cancer cells (Mahanta et al 2008) and their resistance to chemotherapy agents (Fessler et al 2009). These studies showed that full-length MUC1 had no tumor promoting activity. Further, IHC studies show that as tumor stage increases, the amount of MUC1* increases as the amount of full-length MUC1 decreases (FIG. 54). In fact, studies with tissue micro arrays of breast cancers show that nearly 30% of breast cancer specimens had no detectable full-length MUC1, compared to only 5% that were negative for MUC1* (FIG. 10-11). A point to consider for therapeutics that target full-length MUC1 is that if cells expressing full-length MUC1 are eliminated, that would simply enrich the tumor population for the more virulent MUC1* growth factor receptor expressing cells, which would make the cancers worse.

[0730] Reference antibody MNC2, “C2”, was analyzed by FACS for its ability to bind to a panel of cancer cell lines that are all MUC1* positive, with the exception of MDA-MB-231, which expresses MUC1 and MUC1* at a level that is so low that it is often used as a negative control (FIG. 77A-77N). The panel of cancer cells that was probed with MNC2 included T47D and 1500 breast cancer cells, NCI-H292 and NCI-H1975 lung cancer cells, SKOV-3 ovarian cancer cells, HPAF-II and Capan-1 pancreatic cancer cells, DU145 prostate cancer cells, and MDA-MB-231, breast cancer cells, which are nearly MUC1 and MUC1* negative. MNC2 robustly recognized a wide range of cancer cell lines. We note that although MNC2 recognized HPAF-II pancreatic cells, it did not recognize another pancreatic cell line, Capan-1, as well. Similarly, MNC2 did not recognize prostate cancer cell line DU145 very well. In IHC tissue studies, we found that MNC2 recognized about 57% of prostate cancer tissues and 78% of pancreatic tissues, albeit with significant tumor heterogeneity.

[0731] FIG. 78A-78C shows a color coded schematic of the PSMGFR sequence that has been extended or deleted at both the N- and C-termini. Antibodies of the invention were tested against this subset of peptides to further refine the epitopes to which each antibody binds or the critical amino acids within the epitope to which each antibody binds. FIG. 78A is an aligned schematic of the various subsets of peptides. FIG. 78B lists the antibodies that bind to each of the color coded sequences. FIG. 78C lists the cancer cell lines that each antibody recognizes.

[0732] FIGS. 80-87 show graphs of FACS analyses wherein antibodies of the invention are compared for their ability to specifically recognize different types of cancer cells. Percent cells recognized as well as the Mean Fluorescence Intensity, MFI, was measured. Considering only these FACS experiments, they show that only antibodies that recognize the PSMGFR peptide are able to recognize cancer cell lines. Antibodies that bind to epitopes outside of the PSMGFR sequence do not specifically recognize these cancer cell lines.

### IHC Tissue Studies of Normal Versus Cancerous Tissues to Determine True Cancer Specificity

[0733] Immunohistochemistry, IHC, tissue studies of tissue micro arrays, “TMAs”, are a more stringent test of the cancer specificity of antibodies than FACS analysis of a single cancer cell line. Cancer cell lines are a single cell from a single patient that have been expanded in a lab for decades. Cell lines are limited in that they are not representative of a cross section of the human population. Further, after culturing the cell line in vitro for decades it may no longer look like the original cell. Also, there are no real normal cell lines for comparison, as they have to be made immortal. Tissue studies are more informative because each tissue micro array comprises tissues from multiple donors and the cells are in their natural environment, without years of culturing under non-physiologic conditions. Additionally, tissues provide information regarding tumor heterogeneity as well as information regarding normal patterns of expression. Each antibody of the invention was used to probe a normal tissue micro array, FDA Normal Array MNO1021. In addition the antibody was also used to probe a panel of cancerous tissue arrays. In some cases, antibodies that showed strong staining of normal tissues, especially of critical organs such as heart or lung, were tested on a limited number of cancerous tissue arrays, since their cross reactivity to normal tissues eliminated them from consideration as anti-cancer therapeutics.

[0734] FIGS. 113-200 show photographs of the IHC staining of normal TMAs versus cancerous TMAs for each antibody of the invention.

[0735] FIG. 113-120 show photographs of tissues studies probed with antibody 20A10. Recall that 20A10 binds to the PSMGFR peptide, binds to the N-10 peptide, but does not bind to the C-10 peptide. Refined epitope mapping shows that like MNC2 and MNE6, the binding of 20A10 depends on amino acids FPFS being present in the PSMGFR peptide. 20A10 binds to the most membrane proximal part of the MUC1* extra cellular domain. An overview of FDA Normal Tissue Array MNO1021 is shown in FIG. 113. FIG. 114A-114X show that there is little to no cross reactivity of 20A10 for normal tissues. We note that MNC2, MNE6 and 20A10 all react with the MUC1* that is expressed on the luminal edge of the terminal breast ducts, luminal edge of the fallopian tubes, luminal edge of about 10% of the distal collecting ducts of normal kidney, and luminal edge of ureter. Because the staining is strictly limited to the luminal edge of a subset of ducts and glands, these antibodies are considered to be safe as therapeutics as the inside of ducts and glands are protected from large entities carried by blood, such as antibodies or CAR T cells. Importantly, MNC2, MNE6 and 20A10 show no staining of critical organs, such as heart, lung and brain. In stark contrast, 20A10, like MNC2 and MNE6, robustly binds to cancerous tissues. 20A10 stains nearly all specimens of the BR1141 breast cancer array (FIGS. 115-116). In addition to robust staining of the breast cancer tissue, the staining is membrane staining, indicating that 20A10 recognizes an extra cellular portion of MUC1*, which is critical for an effective antibody-based anti-cancer therapeutic. 20A10 also showed robust and membranous staining of pancreatic cancer tissues (FIGS. 117-118) and esophageal cancer tissues (FIGS. 119-120). In summary, 20A10 shows great cancer specificity and as an anti-cancer therapeutic offers a large therapeutic window because of the vast difference between staining of normal tissues and cancerous tissues, in terms of the location and intensity of staining.

[0736] Anti-MUC1* antibody 3C2B1 is an antibody that like MNC2, MNE6 and 20A10, binds to N-10 but not to C-10. More refined epitope mapping shows that like these three other highly cancer-specific antibodies, 3C2B1 requires the FPFS sequence for binding to a MUC1* extra cellular domain peptide. FIG. 121 shows the photograph of the FDA normal array MNO1021. FIGS. 122A-122X shows photographs of specific tissues from FDA normal tissue array MNO1021 stained with the anti-PSMGFR antibody 3C2B1 at 20 ug/mL. As can be seen, there is no binding of 3C2B1 to any critical normal organs. FIG. 123 shows photograph of pancreatic cancer tissue array PA1003 stained with the anti-PSMGFR antibody 3C2B1 at 1-20 ug/mL. FIG. 124 shows photographs of specific tissues from pancreatic cancer tissue array PA1003 stained with the anti-PSMGFR antibody 3C2B1 at 20 ug/mL. FIG. 125 shows photograph of breast cancer tissue array BR1141 stained with the anti-PSMGFR antibody 3C2B1 at 20 ug/mL. FIGS. 126A-126F shows magnified photographs of specific tissues from breast cancer tissue array BR1141 stained with the anti-PSMGFR antibody 3C2B1 at 20 ug/mL. As can be seen in the figure, 3C2B1 robustly stains breast cancer tissues.

[0737] Anti-MUC1* antibody 5C6F3 binds to the N-10 peptide, does bind to the C-10 peptide, although binding is reduced somewhat. Its cognate epitope comprises all or some of the sequence SVSDV (SEQ ID NO:1751). FIG. 127 shows photograph of FDA normal tissue array MNO1021 stained with the anti-PSMGFR antibody 5C6F3 at 1 ug/mL. FIG. 128 shows photographs of specific tissues from FDA normal tissue array MNO1021 stained with the anti-PSMGFR antibody 5C6F3 at 1 ug/mL. FIG. 129 shows photograph of pancreatic cancer tissue array PA1003 stained with the anti-PSMGFR antibody 5C6F3 at 1-20 ug/mL. FIG. 130 shows photographs of specific tissues from pancreatic cancer tissue array PA1003 stained with the anti-PSMGFR antibody 5C6F3 at 1 ug/mL. FIG. 131 shows photograph of breast cancer tissue array BR1141 stained with the anti-PSMGFR antibody 5C6F3 at 1 ug/mL. FIG. 132 shows photographs of specific tissues from breast cancer tissue array BR1141 stained with the anti-PSMGFR antibody 5C6F3 at 1 ug/mL. As can be seen in the FIG. 5C6F3 is a high affinity antibody that has great cancer-specificity and with the exception of adrenal, which may be an artefact of that tissue, did not show binding to normal tissues.

[0738] In contrast to 20A10, which binds to the most membrane proximal part of the MUC1* extra cellular domain, 18B4 binds within the GTINVHDVET sequence, which is the most distal part of the PSMGFR sequence. Unlike antibodies MNC2, MNE6 or 20A10, 18B4 cannot bind to the N-10 peptide but does bind to the C-10 peptide. FIG. 133-134 show the binding of antibody 18B4 to normal tissues. In contrast to 20A10, antibody 18B4 shows strong binding to a wide range of normal tissues (FIG. 134), including lung (FIG. 134K). FIG. 135-138 show 18B4 staining of breast cancer tissues and esophageal cancer tissues. Because of the strong binding of 18B4 to normal tissues, there is less cancer specificity to this antibody.

[0739] FIG. 139-144 show the binding of PSMGFR antibody 18G12 to normal tissues, breast cancer tissues and esophageal cancer tissues. 18G12 is able to bind to the N-10 peptide, but is also able to bind to the C-10 peptide. 18G12 binds to the ASRYNLT epitope within the PSMGFR peptide. Antibody 18G12 binds to the luminal edge of many of the collecting ducts of normal kidney (FIG. 140D), binds to normal heart muscle (FIG. 140I) as well as to normal skeletal muscle (FIG. 140X). However, there is a clear cancer specificity in that 18G12 binds much more strongly to cancerous tissues than to the few normal tissues. In addition, 18G12 stains the entire cancerous tissues rather than just a luminal edge here or there. FIG. 141-146 show 18G12 staining of breast cancer tissues, pancreatic cancer tissues and esophageal cancerous tissues. The contrast between the staining of the normal tissues and the cancer tissues clearly demonstrates cancer specificity.

[0740] FIG. 147-148 show the binding of PSMGFR antibody 25E6 to normal tissues. 25E6 is able to bind to the N-10 peptide, but is also able to bind to the C-10 peptide. 25E6 binds to the ASRYNLT epitope within the PSMGFR peptide. Like MNC2, MNE6 and 20A10, antibody 25E6 binds to the luminal edge of terminal breast ducts, luminal edge of fallopian tubes, to the luminal edge of a subset of the distal collecting ducts of normal kidney and to the luminal edge of ureter. Unlike MNC2, MNE6 and 20A10, 25E6 binds, albeit very weakly, to normal heart muscle (FIG. 148I) as well as to normal skeletal muscle (FIG. 148X). However, there is a clear cancer specificity in that 25E6 binds much more strongly to cancerous tissues than to the few normal tissues. In addition, 25E6 stains the entire cancerous tissues rather than just a luminal edge here or there. FIG. 149-152 show 25E6 staining of breast cancer tissues and pancreatic cancerous tissues. The contrast between the staining of the normal tissues and the cancer tissues clearly demonstrates cancer specificity.

[0741] FIG. 153-156 show the binding of PSMGFR antibody 28F9 to normal tissues and breast cancer tissues. 28F9 is able to bind to the N-10 peptide, but is also able to bind to the C-10 peptide. 28F9 binds to the ASRYNLT epitope within the PSMGFR peptide. Like MNC2, MNE6 and 20A10, antibody 25E6 binds to the luminal edge of terminal breast ducts, luminal edge of fallopian tubes, to the luminal edge of a subset of the distal collecting ducts of normal kidney and to the luminal edge of ureter. FIG. 155-156 show 28F9 staining of breast cancer tissues.

[0742] FIG. 157-158 show the binding of the N+20/C-27 antibody 1E4 to normal tissues. 1E4 is able to bind to the N-10 peptide but also is able to bind to the C-10 peptide. 1E4 binds to the QFNQYKTEA sequence which is within the PSMGFR sequence. Examination of the entire normal tissue micro array (FIG. 157A) shows that antibody 1E4 binds to many normal tissues, including brain, cerebellum, all 3 liver specimens, pancreas, parathyroid, spinal cord and skeletal muscle. Magnified images show that 1E4 stains heart (FIG. 158I) as well. 1E4 staining of a breast cancer array (FIG. 159-160) shows that there is some cancer specificity.

[0743] FIGS. 161-162 show the binding of the N+20/C-27 antibody 29H1 to normal tissues. 29H1 binds within the GTINVHDVET sequence, which is the most distal part of the PSMGFR sequence. Unlike antibodies MNC2, MNE6 or 20A10, 29H1 cannot bind to the N-10 peptide but does bind to the C-10 peptide. Examination of the entire normal tissue micro array (FIG. 157A) shows that even at concentration as low as 0.5 ug/mL, antibody 29H1 strongly stains a wide range of normal tissues, including brain, heart, liver and lung. 29H1 staining of a breast cancer array (FIGS. 163-164) and staining of a pancreatic cancer tissue array (FIGS. 165-166) shows that there is no cancer specificity.

[0744] Antibody 31A1 is similar to 29H1 in that they are both N+20/C-27 antibodies that bind within the GTINVHDVET (SEQ ID NO: 1746) sequence, which is the most distal part of the PSMGFR sequence. Unlike antibodies MNC2, MNE6 or 20A10, neither 31A1 nor 29H1 can bind to the N-10 peptide but do bind to the C-10 peptide. Examination of the entire normal tissue micro array and the magnified images (FIGS. 167-168) shows that even at concentration as low as 0.5 ug/mL, antibody 31A1 strongly stains a wide range of normal tissues, including brain, heart, lung, spleen, bone marrow, and skeletal muscle. 31A1 was used to stain a breast cancer array, (FIGS. 169-170). 31A1 was used over a range of concentrations to stain a pancreatic cancer tissue array (FIGS. 171-172). These figure shows that 31A1 has insufficient cancer specificity.

[0745] Antibody 32C1 is similar to 29H1 and 31A1 in that they are all N+20/C-27 antibodies that bind within the GTINVHDVET sequence, which is the most distal part of the PSMGFR sequence. Unlike antibodies MNC2, MNE6 or 20A10, none of 32C1, 31A1 or 29H1 can bind to the N-10 peptide but all do bind to the C-10 peptide. Examination of the entire normal tissue micro array and the magnified images (FIG. 173-174) shows that even at concentration as low as 0.25 ug/mL, antibody 32C1 strongly stains a wide range of normal tissues, including brain, heart, lung, liver, spleen and bone marrow. 32C1 was also used to probe a breast cancer array (FIG. 175-176). 32C1 was used over a range of concentrations to stain an esophageal cancer tissue array (FIG. 177-178). Taken together, these figures show that 32C1 has insufficient cancer specificity.

[0746] Antibody 45C11 is an N+20/C-27 antibody that binds to epitope SNIKFRPGSVV (SEQ ID NO: 1744) that is 20 amino acids outside of the PSMGFR sequence at the N-terminal end. 45C11 does not bind to the N-10 peptide. Normal tissue array FDA MNO1021 was stained with 45C11 at 12.5 ug/mL (FIG. 179-180). As can be seen in the figures, 45C11 shows strong binding to many normal tissues, including brain, heart, lung, liver, spleen, skeletal muscle and bone marrow. 45C11 was used over a range of concentrations to stain a breast cancer tissue array (FIG. 181-182). 45C11 was also used to stain a pancreatic cancer tissue array (FIG. 183-184). Taken together, these figures show that 45C11 has no cancer specificity.

[0747] Antibody 3C5 is an N+9/C-9 antibody that binds to epitope GTINVHDVET. Like the other antibodies that bind to this epitope such as 32C1, 29H1 and 31A1, they bind to the most distal, that is to say the most N-terminal, part of the PSMGFR sequence. Unlike antibodies MNC2, MNE6 or 20A10, none of 3C5, 32C1, 31A1 or 29H1 can bind to the N-10 peptide but all do bind to the C-10 peptide. Examination of the entire normal tissue micro array, where 3C5 was used at 10 ug/mL, and the magnified images (FIG. 185-186) shows that antibody 3C5 strongly stains some normal tissues, including brain, heart, adrenal gland and bone marrow. 3C5 was also used to probe a pancreatic cancer array at 10 ug/mL, (FIG. 187-188). Taken together, these figures show that 3C5 has no cancer specificity.

[0748] Antibody 8A9 is an N+9/C-9 antibody that binds to epitope VQLTLAFRE which is outside of the PSMGFR sequence. Antibody 8A9 cannot bind to the N-10 peptide. Normal tissue array FDA MNO1021 was stained with 8A9 (FIG. 189-190). As can be seen in the figures, like antibody 45C11, which also binds an epitope that is N-terminal beyond the PSMGFR sequence, antibody 8A9 shows strong binding to many normal tissues, including adrenal, brain, heart, lung, liver, spleen, skeletal muscle and bone marrow. A pancreatic cancer array stained with antibody 8A9 showed weak binding to a subset of pancreatic cancer tissues (FIG. 191-192). Taken together, these figures show that 8A9 has no cancer specificity.

[0749] Antibody 17H6 is an N+9/C-9 antibody that binds to epitope VQLTLAFRE, which is outside of the PSMGFR sequence. 17H6 was used to stain normal tissue array MNO1021. Examination of the entire normal tissue micro array and the magnified images (FIG. 193-194) shows that antibody 17H6 stains some normal tissues, including brain, heart, adrenal gland, bone marrow and skeletal muscle. 17H6 was used to probe a pancreatic cancer array and showed weak binding to most pancreatic cancer tissues (FIG. 195-196). However, the binding of 17H6 to several normal tissues of critical organs shows that 17H6 has little cancer specificity.

[0750] Antibody 39H5 is an N+9/C-9 antibody that binds weakly to the intact PSMGFR peptide but not significantly to any of the subset peptides. 39H5 may bind to the GTINVHDVET, which is the most distal part of the PSMGFR sequence. Examination of the entire normal tissue micro array and the magnified images (FIG. 197-198) shows that antibody 39H5 stains some normal tissues, including brain, heart, liver and bone marrow. 39H5 was used to probe a pancreatic cancer array, (FIG. 199-200). Although 39H5 stained a good percentage of the pancreatic cancer specimens, considering the normal tissues that 39H5 stained, 39H5 has little cancer specificity.

### Summary of FACS Analysis

[0751] Determining the cancer specificity of antibodies using cell lines is difficult, as these cells were obtained from a single patient's tumor decades ago, and then propagated in culture for decades. Even if the patient's tumor was at one point heterogeneous, the decades of in vitro culture have essentially made the cell line a single cell clone. Antibodies of the invention were assayed by FACS to determine if they bound to MUC1 or MUC1* positive cancer cells but not MUC1 negative cells. The results of these experiments are shown in FIGS. 76-87. What is very clear is that antibodies that bind to epitopes of the MUC1 sequence that are outside of and N-terminal to PSMGFR sequence show no cancer specificity. Referring now to the readings of Mean Fluorescence Intensity (MFI) it appears that antibodies with cognate epitopes at the very N-terminus of the PSMGFR sequence, such as those that bind to an epitope within GTINVHDVET, show far less cancer specificity than the antibodies that recognize more C-terminal epitopes. For example, antibody MNC2 that will not bind to the C-10 peptide binds strongly to nearly every MUC1* positive cell line (FIG. 76-77). However, closer examination reveals that MNC2 binds lung cancer line NCI-H1975 much more strongly than NCI-H292. Similarly, MNC2 binds pancreatic cell line HPAF-II much better than Capan-1 or prostate cancer line DU145. PCR measurements show that the expression levels of cleavage enzymes varies greatly across a panel of cancer cell lines (FIG. 43 and FIG. 44). The fold of the MUC1* extra cellular domain can vary greatly depending on which cleavage enzyme clips it, which likely accounts for differences between cancer cell lines that a single antibody recognizes. This variation in antibody recognition of various cell lines, even within a cancer sub-type is apparent in the figures.

### Summary of IHC Data

[0752] IHC analysis of real tissues, including both normal and cancerous tissues, is more informative than the study of cultured cell lines, as is necessary in FACS analysis. Each antibody was first tested over a range of concentrations to determine optimal concentration. Antibody concentration was increased until the stroma also picked up stain, which indicates non-specific background binding. The optimal concentration for that particular antibody was then deemed to be just below the concentration at which the antibody stained the stroma.

[0753] An overview of the IHC tissue studies is shown in FIG. 88-112. Here, we focused on the binding of antibodies to critical organ tissues, since binding to certain normal tissues would likely eliminate therapeutic use of that antibody. In these figures, the antibodies were grouped according to their cognate epitope. What is evident from the tissue studies is that the further the epitope is from the cell membrane, the more it binds to normal MUC1 on normal tissues. For example, binding to normal heart tissue by representative antibodies that recognize a specific epitope are shown in FIG. 88A-88L. As the figure illustrates, antibodies that bind to epitopes that are N-terminal to the PSMGFR peptide such as epitope within SNIKFRPGSVV or VQLTLAFRE show such strong binding to normal heart that they could not be used in therapeutics. In addition, antibodies that bind to the more N-terminal portion of PSMGFR, such as 29H1, also show binding to normal heart. The antibodies with the least binding to normal tissues and the strongest binding to cancerous tissues bind to epitopes within the FPFS or PFPFSAQSGA. Some antibodies that bind to epitopes within the ASRYNLT portion may also be suitable as therapeutics. These antibodies and others that recognize the same epitopes are desirable as anti-cancer therapeutics because they have a large therapeutic window, meaning that because of the low binding to normal tissues, and low side effects, patients can be dosed with antibody levels high enough to effectively kill the tumor cells. More detailed photographs of antibodies of the invention binding, or not binding, to other critical tissues are also shown. FIGS. 89-94 show magnified photographs of each antibody binding to normal heart tissue, where the antibodies have been categorized according to which epitope they bind. FIGS. 95-100 show magnified photographs of each antibody binding to normal liver tissue, where the antibodies have been categorized according to which epitope they bind. FIGS. 101-106 show magnified photographs of each antibody binding to normal lung tissue, where the antibodies have been categorized according to which epitope they bind. FIGS. 107-112 show magnified photographs of each antibody binding to normal bone marrow, where the antibodies have been categorized according to which epitope they bind.

[0754] The results of the IHC studies (FIG. 88-FIG. 200) are summarized in Table 3.

[0755] As can be clearly seen in the table, the further away from the cell membrane that the antibody binds, the more non-specific binding there is. Although these antibodies were generated by immunizing with the PSMGFR peptide, N+20/C-27 peptide or the C+9/C-9 peptide, some of the antibodies generated by immunizing with an extended peptide still bind within the PSMGFR sequence, see FIGS. 63-69 for the details of epitope binding for each antibody. Some binding to normal tissues can be tolerated if the antibody is incorporated into an appropriate therapeutic format. For example, cellular therapies, such as CAR T, are carried by the blood and meet with physiological barriers including lamina propia and blood-brain barrier that limits the cell's access to luminal edge of ducts and glands. Other antibodies that bind much more strongly to cancerous tissues but do show some binding to normal tissues could also be safe and useful therapeutics if administered locally or if cancer-specificity is enhanced by incorporating into a bispecific antibody. However, widespread antibody binding to many normal organs or to essential organs for which there is no physical barrier could be lethal to the patient.

[0756] The most cancer-specific antibodies with little to no binding to normal tissues are MNC2, MNE6, 20A10, 3C2B1 and 25E6. An ideal antibody therapeutic is one that stains no normal tissues but robustly stains cancer cells. Unfortunately, cancer antigens are also expressed on normal tissues, so zero staining of normal tissue is not possible. The aim is to identify an antibody that binds much more strongly to tumor tissue than normal tissue and that either binds to non-critical normal tissues or binds to them in a way that would not be physiologically possible in an intact organ. For example, CAR T cells are carried by the blood and the lamina propia is a barrier to their getting to the luminal edge of a duct or gland. Similarly, the blood brain barrier prevents the passage of large molecules like antibodies from the blood into the brain. The usefulness of an antibody as a therapeutic also depends on the format of the therapeutic. As mentioned, cell based therapies have natural barriers that prevent the CAR T cells from getting to some normal tissues. Antibody Drug Conjugate (ADC) based therapies sometimes depend on a local, cancer-specific molecule to activate the toxin attached to the antibody, minimizing the importance of whether or not a naked antibody binds to some normal tissue. In another example, antibodies and antibody-based therapeutics can be administered locally, including intraperitoneally, to maximize the effect on tumor cells while minimizing their effect on normal tissues. In yet another example, an antibody that is not purely cancer-specific can be made more cancer-specific if it is incorporated into a bispecific antibody where a first side of the molecule binds to a first cancer antigen and the second side of the molecule binds to a second antigen that may be a tissue specific antigen, another cancer specific antigen or even an antigen on a cell such as a T cell, which are called BiTES, bispecific T cell engagers. In yet another example, the less cancer-specific antibody can be incorporated into a cell-based therapy where its expression is induced only after the cell recognizes a tumor. In one aspect, a CAR T cell can express a first CAR that recognizes a first antigen which recognition induces expression of a second antibody, or CAR incorporating the second antibody. In one aspect the cell expresses a CAR directed by an antibody fragment that is cancer-specific and a second antibody or CAR expressing the second antibody is induced to be expressed in an NFAT inducible system. In one aspect the nucleic acids encoding the second antibody or second CAR are down stream of NFAT response elements. The NFAT inducible gene may be inserted into a Foxp3 enhancer or promoter.

[0757] FIG. 202 shows photographs of pancreatic cancer tissues, each from a different patient. As can be seen, the staining pattern of 1E4 is very different from that of 18B4 and the polyclonal antibody SDIX. 18B4 and SDIX antibodies were generated by immunizing animals with the same peptide (PSMGFR), while the 1E4 antibody was generated from immunization with a different peptide (N+20). FIGS. 203-207 show magnified images of selected tissues from this array to highlight the differences between these antibodies. FIG. 208 compares the staining of polyclonal antibody SDIX to monoclonal antibody 20A10, which were both generated from immunization with the PSMGFR peptide. Also shown is the difference in staining pattern for antibody 29H1 which was generated by immunization with an N+20 peptide. Although the antibody staining is lighter, antibody 29H1 recognizes more pancreatic cancer tissue specimens than the SDIX polyclonal or 20A10. FIG. 209 shows that esophageal cancers are belier recognized by antibodies that bind to a MUC1* peptide with an extended N-terminus, such as antibody 29H1 and antibody 31A1. Similarly, FIG. 210 shows that prostate cancers are belier recognized by antibodies that bind to a MUC1* peptide with an extended N-terminus, such as antibody 29H1.

[0758] Below Table 4 shows a summary of the test criteria to determine the cancer-specificity of the various monoclonal antibodies.

TABLE 4
Cancer-Specificity Test Criteria

| | | | | | | | | |
|---|---|---|---|---|---|---|---|---|
| | | | | 3 | 4 | 5 | | |
| | | | 2 | Displaces | Does not | Recognizes | 6 | 7 |
| | | 1 | Does | NME7_{AB} | recognize | MUC1 after | Cancer | Cancer |
| | Binds | Binds | not bind | from | linear | cleavage | selective | selective |
| mAb Name | PSMGFR | N-10 | C-10 | MUC1* | epitope | by MMP9 | by FACS | by IHC |

SNIKFRPGSVVVQLTLAFREGTINVHDVETQFNQYKTEAASRYNLTISDVSVSDVPFPFSAQSGA

| | | | | | | | | |
|---|---|---|---|---|---|---|---|---|
| FPFS | | | | | | | | |
| MNC2 | [symbol] | [symbol] | [symbol] | [symbol] | [symbol] | [symbol] | [symbol] | [symbol] [symbol] [symbol] |
| MNE6 | [symbol] | [symbol] | [symbol] | [symbol] | [symbol] | [symbol] | [symbol] | [symbol] [symbol] [symbol] |
| 20A10 | [symbol] | [symbol] | [symbol] | [symbol] | [symbol] | [symbol] | [symbol] | [symbol] [symbol] [symbol] |
| 3C2B1 | [symbol] | [symbol] | [symbol] | [symbol] | [symbol] | [symbol] | [symbol] | [symbol] [symbol] [symbol] |
| SVSDV | | | | | | | | |
| 5C6F3 | [symbol] | [symbol] | ~ [symbol] | [symbol] | [symbol] | [symbol] | [symbol] | [symbol] [symbol] |
| ASRYNLT | | | | | | | | |
| 25E6 | [symbol] | [symbol] | [symbol] | [symbol] | [symbol] | [symbol] | [symbol] | [symbol] [symbol] |
| MNC3 | [symbol] | ~√ | [symbol] | [symbol] | [symbol] | [symbol] | ND | [symbol] |
| 18G12 | [symbol] | [symbol] | [symbol] | [symbol] | [symbol] | [symbol] | ~√ | [symbol] |
| 28F9 | [symbol] | [symbol] | [symbol] | [symbol] | [symbol] | [symbol] | ~√ | [symbol] |
| QFNQYKTEA | | | | | | | | |
| 1E4 | [symbol] | [symbol] | [symbol] | [symbol] | [symbol] | [symbol] | ~√ | [symbol] |
| GTINVHDVET | | | | | | | | |
| 18B4 | [symbol] | [symbol] | [symbol] | ~√ | [symbol] | [symbol] | [symbol] | [symbol] |
| 29H1 | [symbol] | [symbol] | [symbol] | ~√ | [symbol] | [symbol] | [symbol] | [symbol] |
| 31A1 | [symbol] | [symbol] | [symbol] | [symbol] | [symbol] | [symbol] | [symbol] | [symbol] |
| 32C1 | [symbol] | [symbol] | [symbol] | ~√ | [symbol] | [symbol] | [symbol] | [symbol] |
| 39H5 | [symbol] | [symbol] | [symbol] | ~√ | [symbol] | [symbol] | [symbol] | [symbol] |
| 3C5 | [symbol] | [symbol] | [symbol] | [symbol] | [symbol] | [symbol] | [symbol] | [symbol] [symbol] |
| VQLTLAFRE | | | | | | | | |
| 8A9 | [symbol] | [symbol] | [symbol] | [symbol] | [symbol] | [symbol] | [symbol] | [symbol] [symbol] |
| 17H6 | [symbol] | [symbol] | [symbol] | [symbol] | [symbol] | [symbol] | [symbol] | [symbol] |
| SNIKFRPGSVV | | | | | | | | |
| 45C11 | [symbol] | [symbol] | [symbol] | [symbol] | [symbol] | [symbol] | [symbol] | [symbol] [symbol] [symbol] |

[0759] To summarize, we found that antibodies that bound to sequences that are N-terminal to the PSMGFR sequence had no cancer-specificity. Further, the closer to the cell membrane that the antibody binds, the more cancer-specific is the antibody. More importantly, test criteria 1-4 or even 1-5 provide a set of rapid, multiplexed and inexpensive tests that can be performed on hundreds or thousands of impure hybridoma clone supernatants to identify antibodies that are highly selective for cancer-specific forms of MUC1*.

### Satisfies Test Criteria

[0760] In a preferred embodiment an antibody is chosen for the treatment, prevention or diagnosis of a MUC1* positive cancer based on satisfying four (4) of the seven (7) criteria set out in Table 4. In a more preferred embodiment an antibody is chosen for the treatment, prevention or diagnosis of cancer based on satisfying five (5) of the seven (7) criteria set out in Table 4. In a yet more preferred embodiment an antibody is chosen for the treatment, prevention or diagnosis of cancer based on satisfying six (6) of the seven (7) criteria set out in Table 4. In a more preferred embodiment an antibody is chosen for the treatment, prevention or diagnosis of cancer based on satisfying all seven (7) of the criteria set out in Table 4. An antibody selected for suitability as a treatment for MUC1* positive cancers by virtue of satisfying four or more of the criteria set out in Table 4 can be incorporated in part or in whole into several therapeutic formats. In one aspect of the invention, the antibody or antibody fragment is incorporated into a CAR that is then expressed in an immune cell, which may be a T cell, then administered to a patient who has been diagnosed with or is at risk of developing a MUC1* positive cancer. In another aspect of the invention, a fragment of the antibody which may be an scFv, is incorporated into a BiTE, then administered to a patient who has been diagnosed with or is at risk of developing a MUC1* positive cancer. In yet another aspect of the invention, a fragment of the antibody which may be an scFv, is incorporated into a bi-specific antibody, then administered to a patient who has been diagnosed with or is at risk of developing a MUC1* positive cancer. In yet another aspect of the invention, the antibody or antibody fragment, is conjugated to a toxin or an ADC, antibody drug conjugate, then administered to a patient who has been diagnosed with or is at risk of developing a MUC1* positive cancer.

### Bind to N-10

[0761] We have demonstrated that a MUC1 transmembrane protein, devoid of tandem repeats and having an extra cellular domain of 45 amino acids of PSMGFR sequence, is sufficient to function as a growth factor receptor and confers oncogenic characteristics to the cell (Mahanta et al 2008). Antibodies that bind to the PSMGFR peptide or portion of a transmembrane MUC1 cleavage product can be cancer specific but may also bind to stem or progenitor cells. Antibodies that bind to the N-10 peptide are more cancer-specific. In a preferred embodiment an antibody is chosen for the treatment, prevention or diagnosis of cancer based on the ability of the antibody to bind to the N-10 peptide.

### Do not Bind to C-10

[0762] We have demonstrated that the MUC1 extra cellular domain contains an ectopic binding site that is only exposed if the tandem repeat domain is missing, which can occur as a consequence of alternative splice variant or cleavage and release of the extra cellular domain. Cancer-specific antibodies MNC2 and MNE6 will not bind to full-length MUC1, but do bind to the remaining portion when MUC1 is cleaved and the tandem repeat domain is shed. MNC2 and MNE6 will bind to a MUC1*-like protein if it is devoid of tandem repeats, for example if a MUC1 negative cell is transfected or transduced with an engineered MUC1 that is devoid of tandem repeats, especially if extra cellular domain comprises the PSMGFR. Thus, the ectopic site to which MNC2 and MNE6 bind is unmasked when tandem repeat domain is missing or removed. Both MNC2 and MNE6 require the 10 membrane proximal amino acids of a MUC1* extra cellular domain for binding; they do not bind to the C-10 peptide. That means that the ectopic binding site for MNC2 and MNE6 is within or contains all or part of the 10 C-terminal amino acids of the PSMGFR: PFPFSAQSGA. In a preferred embodiment an antibody is chosen for the treatment, prevention or diagnosis of cancer based on the inability of the antibody to bind to the C-10 peptide. In a preferred embodiment an antibody is chosen for the treatment, prevention or diagnosis of cancer based on the ability of the antibody to bind to the N-10 peptide and the inability of the antibody to bind to the C-10 peptide.

Compete with NME7_{AB} or NME7-X1 for Binding to MUC1* Positive Cell, PSMGFR Peptide or N-10 Peptide

[0763] We have demonstrated that cancer-specific antibodies MNC2 and MNE6 bind to an ectopic epitope that comprises all or part of the 10 C-terminal amino acids of the PSMGFR peptide: PFPFSAQSGA. We have shown that growth factors, dimeric NME1 and NME7_{AB}, also bind to an ectopic epitope that comprises all or part of the 10 C-terminal amino acids of the PSMGFR peptide. MNC2 and MNE6 compete with dimeric NME1 or NME7_{AB} for binding to the PSMGFR peptide and the N-10 peptide. In a preferred embodiment an antibody is chosen for the treatment, prevention or diagnosis of cancer based on the ability of the antibody to disrupt the binding of NME1, NME7_{AB}, or NME7-X1 to the PSMGFR peptide, the N-10 peptide, or to the surface of a MUC1* positive cancer cell.

Recognize a Conformational Epitope Rather than a Linear Epitope

[0764] Antibodies that are cancer-specific will be chosen based on their ability to bind to a MUC1 that is devoid of tandem repeats and for their inability to bind to full-length MUC1. Most often, MUC1* is generated when MUC1 is cleaved by a cleavage enzyme and the tandem repeat domain is released from the cell surface. Cleavage and release of the tandem repeat domain may also unmask portions of MUC1*-like cleavage products that exist on normal tissues. However, antibodies that recognize a conformation, rather than a linear epitope, are more selective. Antibodies that recognize a conformational epitope rather than a linear epitope can be identified by a variety of means. In particular, antibodies that recognize a conformational epitope will not work in a denaturing Western blot assay. In a preferred embodiment an antibody is chosen for the treatment, prevention or diagnosis of cancer based on the ability of the antibody to recognize a conformational epitope.

### Recognize a MUC1* Generated by Cleavage by MMP9 or Other Tumor-Associated Cleavage Enzyme

[0765] The fold, or conformation, of the MUC1* truncated extra cellular domain differs depending on which enzyme cleaves MUC1. Cleaved MUC1* or MUC1*-like cleavage products can function as growth factor receptors on normal healthy tissues. More than one cleavage enzyme is able to cleave MUC1 to a MUC1*-like form. Cleavage by first enzyme may produce a conformation or a fold that is not the same as that produced by cleavage by a second enzyme. Support for this can be found in this application and is illustrated in FIGS. 39-41. These figures show that although a polyclonal antibody that binds to PSMGFR recognizes a cleaved MUC1 on hematopoietic stem cells, some monoclonal antibodies that bind to the PSMGFR peptide can bind to this MUC1*-like form on hematopoietic stem cells while others cannot. For example, MNC3 readily recognizes this cleaved form of MUC1 on hematopoietic stem cells, but MNC2 and MNE6 do not. We know that MNC2 and MNE6 recognize a MUC1* that is produced by cleavage by MMP9 but not when it is cleaved by MMP2. MNC2 and MNE6 are cancer-specific while MNC3 is not, as it recognizes stem and progenitor cells. We also know that MMP9 is overexpressed in cancers. Bone marrow, where hematopoietic stem cells are made expresses nearly 2,500-times more MMP2 than MMP9 (FIG. 65). MMP14 is another enzyme that cleaves MUC1 to a MUC1* growth factor receptor form (FIG. 38). In one aspect of the invention, an antibody is chosen for the treatment, prevention or diagnosis of cancer based on the ability of the antibody to recognize a MUC1 cleavage product generated when MUC1 is cleaved by MMP14. In a preferred embodiment an antibody is chosen for the treatment, prevention or diagnosis of cancer based on the ability of the antibody to recognize a MUC1 cleavage product generated when MUC1 is cleaved by MMP9. In a preferred embodiment an antibody is chosen for the treatment, prevention or diagnosis of cancer based on the ability of the antibody to recognize a MUC1 cleavage product generated when MUC1 is cleaved by MMP9 and also recognizes a conformational epitope.

Binds to Cancer Cells More than Normal Cells

[0766] A traditional approach to identifying antibodies that are cancer-specific involves testing a panel of antibodies against a panel of different cancer cell lines and determining, by FACS, IF, immunoprecipitation or other method, if the antibody binds to cancer cells. Although this approach is traditional, it is sequential and time-consuming, and thus limits the analysis of large numbers of monoclonal antibody clones, which is required to find an ideal antibody suitable for cancer therapeutic or diagnostic. In addition, there are no real normal cell lines and the selection of normal primary cells is limited. The selection criteria presented above provide a rapid, multiplexed method for identifying monoclonal antibody clones that are specific for MUC1* positive cancers. For many of the selection criteria, hybridoma supernatants can be used. This provides a huge advantage over state of the art methods for identifying antibodies that are specific for MUC1* positive cancers. The ability to select antibodies from assay performed using the impure hybridoma supernatants means that much of the selection can be done on hundreds or thousands of clones rapidly and at very little cost. Methods such as FACS analysis ans IHC tissue studies require the use of purified antibodies which limits the number of clones that can be tested to tens, not even hundreds.

[0767] However, selecting an antibody based on its ability to bind to cancer cells, or a cancer cell type or to a cell engineered to express a certain antigen is important for antibody selection. In a preferred embodiment an antibody is chosen for the treatment, prevention or diagnosis of cancer based on the ability of the antibody to bind to MUC1* positive cancer cells.

Binds to Tumor Tissue More than Normal Tissue

[0768] Immunohistochemistry, IHC, tissue studies of cancerous versus normal tissues is a more stringent test of the cancer specificity of antibodies than FACS analysis. Cancer cell lines are a single cell from a single patient that have been expanded in a lab for decades and are not representative of a cross section of the human population. Further, analysis of cell lines is blind to the heterogeneity of actual tumors. Tissue studies require purified antibody, are very expensive, time-consuming and require a skilled pathologist to analyze each stained tissue specimen. However, antibody staining of tissues from normal tissues versus cancerous tissues can reveal which antibodies cannot be used as therapeutics or diagnostics because of their cross-reactivity with normal tissues. Our systematic studies of numerous antibodies with thousands of human normal tissues or cancerous tissues, across several cancer sub-types showed that antibodies that bind to N-10, not C-10, disrupt the binding of NME1 or NME7_{AB}, or NME7-X1 to the PSMGFR peptide, the N-10 peptide, or to the surface of a MUC1* positive cancer cell, recognize a conformational epitope, and recognize a conformational epitope created by cleavage by MMP9 are the most cancer-specific.

[0769] In a preferred embodiment an antibody is chosen for the treatment, prevention or diagnosis of cancer based on the ability of the antibody to bind to MUC1* positive tumor tissue at least 2-times more than it binds to normal tissues. In a preferred embodiment an antibody is chosen for the treatment, prevention or diagnosis of cancer based on the ability of the antibody to bind to MUC1* positive tumor tissue at least 5-times more than it binds to normal tissues. In a preferred embodiment an antibody is chosen for the treatment, prevention or diagnosis of cancer based on the ability of the antibody to bind to MUC1* positive tumor tissue at least 10-times more than it binds to normal tissues.

Antibodies that Bind to Refined Epitopes

[0770] In a preferred embodiment, an antibody, or fragments thereof, that binds to a peptide comprising the sequence QFNQYKTEAASRYNLTISDVSVSDVPFPFSAQSGA are incorporated into anti-cancer therapeutics or diagnostics for the diagnosis, treatment or prevention of a MUC1* positive cancer.

[0771] In a more preferred embodiment, an antibody, or fragments thereof, that binds to a peptide comprising the sequence ASRYNLTISDVSVSDVPFPFSAQSGA are incorporated into anti-cancer therapeutics or diagnostics for the diagnosis, treatment or prevention of a MUC1* positive cancer.

[0772] In a yet more preferred embodiment, an antibody, or fragments thereof, that binds to a peptide comprising the sequence SDVSVSDVPFPFSAQSGA are incorporated into anti-cancer therapeutics or diagnostics for the diagnosis, treatment or prevention of a MUC1* positive cancer.

[0773] In a still more preferred embodiment, an antibody, or fragments thereof, that binds to a peptide comprising the sequence SVSDV are incorporated into anti-cancer therapeutics or diagnostics for the diagnosis, treatment or prevention of a MUC1* positive cancer.

[0774] In a yet still more preferred embodiment, an antibody, or fragments thereof, that binds to a peptide comprising some or all of the sequence PFPFSAQSGA are incorporated into anti-cancer therapeutics or diagnostics for the diagnosis, treatment or prevention of a MUC1* positive cancer. As an anti-cancer treatment, the selected antibodies or fragments thereof are incorporated into a CAR, BiTE, ADC or bi-specific and then administered to a patient diagnosed with or at risk of developing a MUC1* positive cancer.

### Consensus Sequences

[0775] Antibodies of the invention were categorized according to cognate epitope. Sequences of their respective heavy chain CDRs are shown in Table 5. Sequences of their respective light chain CDRs are shown in Table 6. Consensus sequences for CDR1, CDR2 and CDR3 for each epitope-specific set of antibodies were computer generated. FIG. 215 and FIG. 216 show how the CDR consensus sequences change as the position of the antibodies' cognate epitope moves from the membrane-proximal portion of PSMGFR toward the more distal portions.

[0776] As can be seen in Table 5 and Table 6, the sequences for CDR1 and CDR2 for antibodies that bind to epitopes within the 10 membrane-proximal (C-terminal) portion of PSMGFR peptide closely adhere to the consensus sequence.

TABLE 5
HEAVY CHAIN CDRs
GTINVHDVETQFNQYKTEAASRYNLTISDVSVSDVPFPFSAQSGA

| Epitope | Name | CDR1 | CDR2 | CDR3 |
|---|---|---|---|---|
| FPES | MNC2 | FTFSGYAMS | TISSGGTYIYYPDSVKG | -LGGDNYYEYEDV-- |
| FPFS | MNE6 | FTFSRYGMS | TISGGGTYIYYPDSVKG | DNYGRNYDYGMDY-- |
| FPES | 20A10 | FTFSTYAMS | -SIGRAGSTYYSDSVKG | ---GPIYNDYDEFAY |
| FPFS | 3C2B1 | ITFSTYTMS | TISTGGDKTYYSDSVKG | -GTTAMYYYAMDY- |
| Consensus Sequence | | [symbol] | [symbol] | [symbol] |
| SVSDV | 5C6F3 | FTESTYAMS | AISNGGGYTYYPDSLKG | RYYDHYFDY |
| ASRYNLT | 25E6 | FTFSSYGMS | TISNGGRHTFYPDSVKG | QTGTEGWFAY |
| ASRYNLT | MNC3 | YRFTDYAMN | VISTESGNTNENQKFKG | SDYYGPYFDY |
| ASRYNLT | 18G12 | YTFTGYFLY | GINPDNGGIDENEKERN | --LIGNY--- |
| ASRYNLT | 28F9 | YTFTGYFLY | GIHPSNGDTDENEKFKN | --LIGVY--- |
| Consensus Sequence | | [symbol] | [symbol] | [symbol] |
| QFNQYKTEA | 1E4 | YAFSTYWMN | QIYPGDSDTNYNGKEKG | GNHASMDY |
| GTINVHDVET | 18B4 | FTENDAWMD | EIRSTANIHTTYYAESVQ | -----LLYGFAY |
| | | | G | |
| GTINVHDVET | 29H1 | FTFSDAWMD | EIRSKATNHATYYAESVK | -----LLYGFAY |
| | | | G | |
| GTINVHDVET | 31A1 | YTFTSYWMH | YINPSTGYTEYNQKFKD | -----AYIDY-- |
| GTINVHDVET | 32C1 | FTFSNYWMN | EIRLKSNNYAIHYAESVK | VPGLDAY----- |
| | | | G | |
| GTINVHDVET | 39H5 | YTFTNYGMN | WINTYTGEPTYVGDEKG | --GIHGYVDY-- |
| GTINVHDVET | 3C5 | YTFTNYGMN | WINTYTGKPTYADDEKG | -GGLDGYYGY- |
| Consensus Sequence | | [symbol] | [symbol] | [symbol] |

TABLE 6
LIGHT CHAIN CDRs
GTINVHDVETQFNQYKTEAASRYNLTISDVSVSDVPFPFSAQSGA

| Epitope | Name | CDR1 | CDR2 | CDR3 |
|---|---|---|---|---|
| FPFS | MNC2 | RASKS--VSTSGYSYMH | LASNLES | QHSRELPFT |
| FPFS | MNE6 | -------SATSSVSYIH | STSNLAS | QQRSSSPFT |
| FPFS | 20A10 | KSSQSVLYSSNQKNYLA | WASTRES | -HQYLSSLT |
| FPFS | 3C2B1 | RASKS---ISTSDYNYIH | LASNLES | QHSRELPLT |
| Consensus Sequence | | [symbol] | [symbol] | [symbol] |
| SVSDV | 5C6F3 | RSSQTIVHSNGNTYLE | KVSNRFS | FQDSHVPLT |
| ASRYNLT | 25E6 | KSSQSLLDSDGKTYLN | LVSKLDS | WQGTHEPQT |
| ASRYNLT | MNC3 | RSSQTIVHSNGNTYLE | KVSNRFS | FQGSHVPFT |
| ASRYNLT | 18G12 | KSSQSLLHSDGKTYLI | LVSKLDS | CQGTHEPWT |
| ASRYNLT | 28F9 | KSSQSLLHSDGKTYLI | LVSKLDS | CQGTHEPWT |
| Consensus Sequence | | [symbol] | [symbol] | [symbol] |
| QFNQYKTEA | 1E4 | RSSQSLVHSNGNTYLH | KVSNRFS | SQKTHVPWT |
| GTINVHDVET | 18B4 | RTSQSLVHSNGNTYLH | KVSSRES | SQNTHVPYT |
| GTINVHDVET | 29H1 | RSGQSLVHSNGHTYLH | KVSNRFS | SQTTHVPWT |
| GTINVHDVET | 31A1 | RSSQSIVHSNGNTYLE | KVSNRFS | FQVSHFPWT |
| GTINVHDVET | 32C1 | RSSQSLVHSNGNTYLH | KVSNRFS | SQITHVPYT |
| GTINVHDVET | 39H5 | RSSQSIVHRNGNTYL- | KVSNRFS | FQGSHLPWT |
| GTINVHDVET | 3C5 | KSSQSLLHSKGKTYLN | LVSKLES | LQTTHEPWT |
| Consensus Sequence | | [symbol] | [symbol] | [symbol] |

[0777] Whereas Heavy Chain CDR1 for MNC2 is FTFSGYAMVS, with the amino acids numbered from left to right 1 through 9, the consensus of other antibodies that bind to that portion of PSMGFR is: F or I at position 1, T at position 2, F at position 3, S at position 4, T, G, or R at position 5, Y at position 6, A, G or T at position 7, M at position 8 and S at position 9.

[0778] In a preferred embodiment an antibody is chosen for the treatment, prevention or diagnosis of cancer based on having a heavy chain CDR1 that is at least 90% identical to a CDR1 comprising the following amino acids at the specified positions: F or I at position 1, T at position 2, F at position 3, S at position 4, T, G, or R at position 5, Y at position 6, A, G or T at position 7, M at position 8 and S at position 9.

[0779] Whereas Heavy Chain CDR2 for MNC2 is TISSGGTYIYYPDSVKG, with the amino acids numbered from left to right 1 through 17, the consensus of other antibodies that bind to that portion of PSMGFR is: T at position 1, I or S at position 2, I or S at position 3, G or R at position 5, G or A at position 6, T or I at position 9, Y at position 10, Y at position 11, P or S at position12 and DSVKG for positions 13-17.

[0780] In a preferred embodiment an antibody is chosen for the treatment, prevention or diagnosis of cancer based on having a heavy chain CDR2 that is at least 90% identical to a CDR2 comprising the following amino acids at the specified positions: T at position 1, I or S at position 2, I or S at position 3, G or R at position 5, G or A at position 6, T or I at position 9, Y at position 10, Y at position 11, P or S at position12 and DSVKG for positions 13-17.

[0781] Whereas Heavy Chain CDR3 for MNC2 is -LGGDNYYEYFDV--, with the amino acids numbered from left to right 1 through 15, the consensus of other antibodies that bind to that portion of PSMGFR is: G, L, or N at position 2, G or T at position 4, Y at position 7, D or E at position 12, A at position 14, and Y at position 15.

[0782] In a preferred embodiment an antibody is chosen for the treatment, prevention or diagnosis of cancer based on having a heavy chain CDR3 that is at least 90% identical to a CDR3 comprising the following amino acids at the specified positions: G, L, or N at position 2, G or T at position 4, Y at position 7, D or E at position 12, A at position 14, and Y at position 15.

[0783] Whereas Light Chain CDR1 for MNC2 is RASKS--VSTSGYSYMH, with the amino acids numbered from left to right 1 through 17, the consensus of other antibodies that bind to that portion of PSMGFR is: K or R at position 1, A or S at position 2, S at position 3, K or Q at position 4, S at position 5, V at position 6, L at position 7, T or S at position 10, Y at position 15, and I, L or M at position 16.

[0784] In a preferred embodiment an antibody is chosen for the treatment, prevention or diagnosis of cancer based on having a light chain CDR1 that is at least 90% identical to a CDR1 comprising the following amino acids at the specified positions: K or R at position 1, A or S at position 2, S at position 3, K or Q at position 4, S at position 5, L or V at position 6, L at position 7, T or S at position 10, Y at position 15, and I, L or M at position 16.

[0785] Whereas Light Chain CDR2 for MNC2 is LASNLES, with the amino acids numbered from left to right 1 through 7, the consensus of other antibodies that bind to that portion of PSMGFR is: L or W, or S at position 1, A or T at position 2, S at position 3, N or T at position 4, L or R at position 5, E or A at position 6, and S at position 7.

[0786] In a preferred embodiment an antibody is chosen for the treatment, prevention or diagnosis of cancer based on having a light chain CDR2 that is at least 90% identical to a CDR2 comprising the following amino acids at the specified positions: L or W, or S at position 1, A or T at position 2, S at position 3, N or T at position 4, L or R at position 5, E or A at position 6, and S at position 7.

[0787] Whereas Light Chain CDR3 for MNC2 is QHSRELPFT, with the amino acids numbered from left to right 1 through 9, the consensus of other antibodies that bind to that portion of PSMGFR is: Q at position 1, H or Q at position 2, S, Q or R at position 3, R, S or Y at position 4, E, L, or S at position 5, L or S at position 6, P or S at position 7, F or L at position 8 and T at position 9.

[0788] In a preferred embodiment an antibody is chosen for the treatment, prevention or diagnosis of cancer based on having a light chain CDR3 that is at least 90% identical to a CDR3 comprising the following amino acids at the specified positions: Q at position 1, H or Q at position 2, S, Q or R at position 3, R, S or Y at position 4, E, L, or S at position 5, L or S at position 6, P or S at position 7, F or L at position 8 and T at position 9.

[0789] Another set of antibodies was generated and resultant clones were tested for their ability to bind to PSMGFR, N-10 and C-10 peptides. Antibody clones that bound to PSMGFR and N-10 peptides, but not to the C-10 peptide were selected. These antibodies were sequenced. Table 7 shows the sequences of the heavy chain CDRs for cancer-specific antibodies MNC2, MNE6, 20A10, 3C2B1, plus new antibodies B2, B7, 8C7F3, H11 and B9. Table 8 shows the sequences of the light chain CDRs for cancer-specific antibodies MNC2, MNE6, 20A10, 3C2B1, plus new antibodies B2, B7, 8C7F3, H11 and B9. Consensus sequences for the heavy and light chain CRDs were generated and are shown in Table 7 and Table 8. Although antibodies 5C6F3 and 25E6 showed great cancer specificity in IHC tissue studies and they both bound to the PSMGFR and N-10 peptides, but not to the C-10 peptide, epitope mapping showed that they bound to epitopes that were a bit N-terminal to the epitopes to which MNC2, MNE6, 20A10 and 3C2B1 bound. For this reason, consensus sequences were generated for MNC2, MNE6, 20A10, 3C2B1 and the new antibodies plus consensus sequences were generated for all the antibodies that bound to N-10 but not to C-10.

[0790] As can be seen in Table 7 and Table 8, the sequences for CDR1, CDR2 and CDR3 for antibodies that require for binding the 10 membrane-proximal (C-terminal) amino acids of PSMGFR peptide closely adhere to a common consensus sequence.

TABLE 7
HEAVY CHAIN CDRs for antibodies that share broader epitope in
that they cannot bind to the C-10 peptide
GTINVHDVETQFNQYKTEAASRYNLTISDVSVSDVPFPFSAQSGA

| Epitope | Name | CDR1 | CDR2 | CDR3 |
|---|---|---|---|---|
| FPFS | MNC2 | FTFSGYAMS | TISSGGTYIYYPDS | -LGGDNYYEYFDV-- |
| | | | VKG | |
| FPFS | MNE6 | FTFSRYGMS | TISGGGTYIYYPDS | DNYGRNYDYGMDY-- |
| | | | VKG | |
| FPFS | 20A10 | FTFSTYAMS | SIGRAGSTYYSDSV | ---GPIYNDYDEFAY |
| | | | KG | |
| FPES | 3C2B1 | ITFSTYTMS | TISTGGDKTYYSDS | -GTTAMYYYAMDY-- |
| | | | VKG | |
| PFPFSAQS | B2 | FAFSTEAMS | AISNGGGYTYYPDT | ----RYYDLYFDL-- |
| GA | | | LKG | |
| PFPFSAQS | B7 | FTFSRYGMS | TISSGGTYIYYPDS | DNYGSSYDYAMDY-- |
| GA | | | VKG | |
| PFPFSAQS | 8C7F3 | FTFSTYAMS | AISNGGGYTYYPDS | ---RYYDHYFDY-- |
| GA | | | LKG | |
| PFPFSAQS | H11 | FAFSTEAMS | AISNGGGYTYYPDT | ---RYYDLYFDL-- |
| GA | | | LKG | |
| PFPFSAQS | B9 | FTFSRYGMS | TISSGGTYIYYPDS | DNYGSSYDYAMDY-- |
| GA | | | VKG | |
| Consensus Sequence | | [symbol] | [symbol] | [symbol] |
| -all of | | | | |
| antibodies | | | | |
| above | | | | |
| SVSDV | 5C6F3 | FTFSTYAMS | AISNGGGYTYYPDS | RYYDHYFDY |
| | | | LKG | |
| ASRYNLT | 25E6 | FTFSSYGMS | TISNGGRHTFYPDS | QTGTEGWFAY |
| | | | VKG | |
| Consensus Sequence | | [symbol] | [symbol] | [symbol] |
| -all of | | | | |
| antibodies | | | | |
| above | | | | |

TABLE 8
LIGHT CHAIN CDRs for antibodies that
share broader epitope in that they
cannot bind to the C-10 peptide
GTINVHDVETQFNQYKTEAASRYNLTISDVSVSDVPFPFSAQSGA

| Epitope | Name | CDR1 | CDR2 | CDR3 |
|---|---|---|---|---|
| FPFS | MNC2 | RASKS--VSTSGYSYMH | LASNLES | QHSRELPFT |
| FPFS | MNE6 | -------SATSSVSYIH | STSNLAS | QQRSSSPFT |
| FPFS | 20A10 | KSSQSVLYSSNQKNYLA | WASTRES | -HQYLSSLT |
| FPES | 3C2B1 | RASKS---ISTSDYNYIH | LASNLES | QHSRELPLT |
| PFPFSAQSGA | B2 | RSSQNIV-HSNGNTYLE | KVSNRFS | FQDSHVPLT |
| PFPFSAQSGA | B7 | RSSQTIV-HSNGNTYLE | KVSNRFS | FQDSHVPLT |
| PFPFSAQSGA | 8C7F3 | --RASESVATYGNNEMQ | LASTLDS | QQNNEDPPT |
| PFPFSAQSGA | H11 | RSSQNIV-HSNGNTYLE | KVSNRFS | FQDSHVPLT |
| PFPFSAQSGA | B9 | -------SASSSVSYMH | TTSNLAS | QQRSSYPF- |
| Consensus Sequence- | | [symbol] | [symbol] | [symbol] |
| all of | | | | |
| antibodies | | | | |
| above | | | | |
| SVSDV | 5C6F3 | RSSQTIVHSNGNTYLE | KVSNRFS | FQDSHVPLT |
| ASRYNLT | 25E6 | KSSQSLLDSDGKTYLN | LVSKLDS | WQGTHFPQT |
| Consensus Sequence- | | [symbol] | [symbol] | [symbol] |
| all | | | | |
| antibodies | | | | |

[0791] Whereas Heavy Chain CDR1 for MNC2 is FTFSGYAMS, with the amino acids numbered from left to right 1 through 9, the consensus sequence of MNC2, MNE6, 20A10, 3C2B1 and new antibodies B2, B7, 8C7F3, H11 and B9 is: F or I at position 1, T or A at position 2, F at position 3, S at position 4, T, G, or R at position 5, Y or F at position 6, A, G or T at position 7, M at position 8 and S at position 9. The underlined amino acids at positions 2 and 6 are the only additional variants to the consensus sequence generated for cancer-specific antibodies MNC2, MNE6, 20A10, 3C2B1 alone.

[0792] As can be seen in Table 7, the inclusion of antibodies 5C6F3 and 25E6 into the generation of consensus sequence did not change in any way the consensus sequence for heavy chain CDR1 that describes a cancer-specific anti-MUC1* antibody.

[0793] In a preferred embodiment an antibody is chosen for the treatment, prevention or diagnosis of cancer based on having a heavy chain CDR1 that is at least 90% identical to a CDR1 comprising the following amino acids at the specified positions: F or I at position 1, T or A at position 2, F at position 3, S at position 4, T, G, or R at position 5, Y or F at position 6, A, G or T at position 7, M at position 8 and S at position 9.

[0794] Whereas Heavy Chain CDR2 for MNC2 is TISSGGTYIYYPDSVKG, with the amino acids numbered from left to right 1 through 17, the consensus sequence of MNC2, MNE6, 20A10, 3C2B1 and new antibodies B2, B7, 8C7F3, H11 and B9 is:
[0795] T or A at position 1, I or S at position 2, I or S at position 3, N, S, T or G at position 4, G or R at position 5, G or A at position 6, G, T, or D at position 7, Y, K or S at position 8, T or I at position 9, Y at position 10, Y at position 11, P or S at position12 and D at position 13, S or T at position 14, V or L at position 15 and KG for positions 16-17. The underlined amino acids indicate how this more inclusive consensus sequence differs from the consensus sequence generated for MNC2, MNE6, 20A10 and 3C2B1 alone. Of the 17 amino acids in heavy chain CDR2, the consensus sequence for all nine antibodies differs from the consensus sequence for the original cancer-specific four by only 4 amino acids. Note that 2 of the 4 variants are homologous changes, T for S and L for V, which generally do not significantly impact the structure or specificity of a protein.

[0796] As can be seen in Table 7, the inclusion of antibodies 5C6F3 and 25E6 into the generation of consensus sequence for heavy chain CDR2 only changed the consensus sequence by the addition of two other possible amino acids: a possible H at position 8, and a possible F at position 10, for a heavy chain CDR2 that describes a cancer-specific anti-MUC1* antibody. We note that the change of Y to F at position 10 is a homologous change, which generally does not significantly impact the structure or specificity of a protein.

[0797] In a preferred embodiment an antibody is chosen for the treatment, prevention or diagnosis of cancer based on having a heavy chain CDR2 that is at least 90% identical to a CDR2 comprising the following amino acids at the specified positions: T or A at position 1, I or S at position 2, I or S at position 3, N, S, T or G at position 4, G or R at position 5, G or A at position 6, G, T, or D at position 7, Y, K, H or S at position 8, T or I at position 9, Y or F at position 10, Y at position 11, P or S at position12 and D at position 13, S or T at position 14, V or L at position 15 and KG for positions 16-17.

[0798] Whereas Heavy Chain CDR3 for MNC2 is LGGDNYYEYFDV, with the amino acids numbered from left to right 2 through 13, the consensus sequence of MNC2, MNE6, 20A10, 3C2B1 and new antibodies B2, B7, 8C7F3, H11 and B9 is:
[0799] G, L, or N at position 2, G, T, or Y at position 3, G or T at position 4, A, D, P, R, or S at position 5, Y, M, I or S at position 6, Y at position 7, D, Y, or N at position 8, E, D, Y, L or H at position 9, Y, A, or G at position 10, M, D or F at position 11, D or E at position 12, V, F, Y or L at position 13, and AY at position 14-15. The underlined amino acids indicate how this more inclusive consensus sequence differs from the consensus sequence generated for MNC2, MNE6, 20A10 and 3C2B1 alone. Of the 15 amino acids in heavy chain CDR3, the consensus sequence for all nine antibodies differs from the consensus sequence for the original cancer-specific four by 7 amino acids, with 3 of the 7 substitutions at position 6. For this reason, we conclude that the amino acid at position 6 can be varied without altering the specificity of the antibody.

[0800] Analysis of the consensus sequence generated with the inclusion of antibodies 5C6F3 and 25E6 highlighted which amino acids were conserved among all eleven antibodies. For this reason, our preferred consensus sequence for heavy chain CDR3 defines amino acids at positions 2, 3, 4, 7, 10, 11, 12, 14 and 15, where for 11 antibodies, there were 3 or less variants at these positions.

[0801] In a preferred embodiment an antibody is chosen for the treatment, prevention or diagnosis of cancer based on having a heavy chain CDR3 that is at least 90% identical to a CDR3 comprising the following amino acids at the specified positions: G, L, or N at position 2, G, T, or Y at position 3, G or T at position 4, Y at position 7, Y, A, or G at position 10, M, D or F at position 11, D or E at position 12 and AY at position 14-15.

[0802] Whereas Light Chain CDR1 for MNC2 is RASKS--VSTSGYSYMH, with the amino acids numbered from left to right 1 through 17, the consensus sequence of MNC2, MNE6, 20A10, 3C2B1 and new antibodies B2, B7, 8C7F3, H11 and B9 is:
[0803] K or R at position 1, A or S at position 2, S or R at position 3, K, Q or A at position 4, S, N or T at position 5, V, I, E, or K at position 6, L, V or S at position 7, S, Y, I or V at position 8, A, S, or H at position 9, T or S at position 10, N, S, or Y at position 11, G, S, D, or Q at position 12, V, Y, K or N at position 13, N, S, or T at position 14, Y or F at position 15, and I, L or M at position 16, and H, A, E or Q at position 17. The underlined amino acids indicate how this more inclusive consensus sequence differs from the consensus sequence generated for MNC2, MNE6, 20A10 and 3C2B1 alone. Of the 17 amino acids in light chain CDR1, the consensus sequence for all nine antibodies differs from the consensus sequence for the original cancer-specific four by 13 amino acids. 4 of the 13 are homologous substitutions, which in general do not significantly alter the structure or specificity of the protein. Of the remaining 9 substitutions, 1 is at position 4, 1 is at position 5, 3 are at position 6, 1 is at position 7, 1 is at position 11, and 2 are at is at position 17. The inclusion of the 5 new antibodies did not alter the amino acids, excluding homologous substitutions, at positions 1, 2, 3, 8, 9, 10, 12, 13, 14, 15 or 16. For this reason, we conclude that the conserved consensus sequence for light chain CDR1 that defines a MUC1* cancer-specific antibody comprises the amino acids given above for positions 1, 2, 3, 8, 10, 12, 13, 14, 15 and 16.

[0804] Analysis of the consensus sequence generated with all the antibodies, including 5C6F3 and 25E6 further altered the consensus sequence for light chain CDR1 with amino acid substitutions as follows: L at position 6; D at position 9; D at position 11 and N at position 17. We note that none of these substitutions were at positions that were invariant for the original four cancer-specific antibodies plus the five new antibodies. Thus, we conclude that a conserved consensus sequence for light chain CDR1 that defines at least 90% identity of a cancer-specific antibody comprises amino acids defined above at positions 1, 2, 3, 8, 10, 12, 13, 14, 15 and 16.

[0805] In a preferred embodiment an antibody is chosen for the treatment, prevention or diagnosis of cancer based on having a light chain CDR1 that is at least 90% identical to a CDR1 comprising K or R at position 1, A or S at position 2, S or R at position 3, S, Y, I or V at position 8, T or S at position 10, G, S, D, or Q at position 12, V, Y, K or N at position 13, N, S, or T at position 14, Y or F at position 15, and I, L or M at position 16.

[0806] Whereas Light Chain CDR2 for MNC2 is LASNLES, with the amino acids numbered from left to right 1 through 7, the consensus sequence of MNC2, MNE6, 20A10, 3C2B1 and new antibodies B2, B7, 8C7F3, H11 and B9 is: L, W, S, T or K at position 1, A, T or V at position 2, S at position 3, N or T at position 4, L or R at position 5, E, A, F or D at position 6, and S at position 7. The underlined amino acids indicate how this more inclusive consensus sequence differs from the consensus sequence generated for MNC2, MNE6, 20A10 and 3C2B1 alone.

[0807] In a preferred embodiment an antibody is chosen for the treatment, prevention or diagnosis of cancer based on having a light chain CDR2 that is at least 90% identical to a CDR2 comprising the following amino acids at the specified positions: L, W, S, T or K at position 1, A, T or V at position 2, S at position 3, N or T at position 4, L or R at position 5, E, A, F or D at position 6, and S at position 7. Of the 7 positions, the inclusion of the five new antibodies introduced 5 substitutions of which only 2 were not homologous substitutions.

[0808] Analysis of the consensus sequence generated with all the antibodies, including 5C6F3 and 25E6 further altered the consensus sequence for light chain CDR2 with amino acid substitutions as follows: K at position 4, which is a substitution that is homologous to N.

[0809] In a preferred embodiment an antibody is chosen for the treatment, prevention or diagnosis of cancer based on having a light chain CDR2 that is at least 90% identical to a CDR2 comprising: A, T or V at position 2, S at position 3, N, T, or K at position 4, L or R at position 5, E, A, F or D at position 6, and S at position 7.

[0810] Whereas Light Chain CDR3 for MNC2 is QHSRELPFT, with the amino acids numbered from left to right 1 through 9, t the consensus sequence of MNC2, MNE6, 20A10, 3C2B1 and new antibodies B2, B7, 8C7F3, H11 and B9 is: Q or F at position 1, H or Q at position 2, S, Q, R, D or N at position 3, R, S, Y or N at position 4, E, L, S or H at position 5, L, S, V, D or Y at position 6, P or S at position 7, F, L or P at position 8 and T at position 9. The underlined amino acids indicate how this more inclusive consensus sequence differs from the consensus sequence generated for MNC2, MNE6, 20A10 and 3C2B1 alone.

[0811] Analysis of the consensus sequence generated with all the antibodies, including 5C6F3 and 25E6 further altered the consensus sequence for light chain CDR2 with amino acid substitutions as follows: W at position 1; G at position 3; T at position 4; F at position 5; Q at position 8.

[0812] In a preferred embodiment an antibody is chosen for the treatment, prevention or diagnosis of cancer based on having a light chain CDR3 that is at least 90% identical to a CDR2 comprising: Q, F or W at position 1, H or Q at position 2, R, S, T, Y or N at position 4, E, L, S or H at position 5, L, S, V, D or Y at position 6, P or S at position 7, and T at position 9.

Other General Strategy for Using Antibodies, Antibody Fragments and CARs that Target the Extracellular Domain of MUC1*

[0813] In another aspect, the invention is directed to a composition that includes at least two different plasmids transfected into the same immune cell, wherein the first encodes a CAR comprising an antibody fragment, scFv, or peptide that binds to a tumor antigen and the other encodes a gene that is not a CAR, wherein the gene that is not a CAR is expressed from an inducible promoter that is activated by elements of an activated immune cell. In one aspect, the immune cell is a T cell or an NK cell. In one aspect the immune cell is derived from a stem cell that has been directed to differentiate to that immune cell type in vitro. In another aspect, a CAR containing sequences of the antibody are expressed in a stem cell, which then may be differentiated into an immune cell. In one aspect the CAR comprises an antibody fragment, scFv or peptide that binds to the extra cellular domain of MUC1*. In one aspect the CAR comprises an scFv derived from MNC2, MNE6, 20A10, 3C2B1, 5C6F3, 25E6, 18G12, 28F9, 1E4, B12, B2, B7, B9, 8C7F3, or H11. In one aspect the non-CAR species is a cleavage enzyme. In one aspect the cleavage enzyme is MMP2, MMP3, MMP9, MMP13, MMP14, MMP16, ADAM10, ADAM17, ADAM28 or catalytically active fragments thereof. In another aspect the non-CAR species is a cytokine. In one aspect, the Cytokine is IL-7. In one aspect the cytokine is IL-15. In one aspect the cytokine is IL-12. In one aspect the cytokine is IL-18. The sequence of an activated IL-18 is given (SEQ ID NOS:1637-1638). Two examples of NFAT-inducible IL-18 embedded in the Foxp3 enhancer region are given (SEQ ID NOS:1639-1640). Two examples of NFAT-inducible IL-18 embedded in the IL-2 enhancer region are given (SEQ ID NOS:1641-1642). In one case, there are three (3) NFAT response elements and in the other acse there are six (6) NFAT response elements. The number of NFAT response elements can be varied in order to get the desired amount of IL-18 expressed upon CAR T cell recognition of the target. Examples of antibodies of the invention incorporated into CARS with inducible IL-18 are shown as: murine or human MNC2 in a CAR with a 4-1BB or CD28 co-stimulatory domain plus inducible IL-18 (SEQ ID NOS:1643-1646), or also with a 1XX mutated CD3-zeta (SEQ ID NOS:1647-1650); murine or human MNE6 in a CAR with a 4-1BB or CD28 co-stimulatory domain plus inducible IL-18 (SEQ ID NOS:1651-1654), or also with a 1XX mutated CD3-zeta (SEQ ID NOS:1655-1658); murine or human 20A10 in a CAR with a 4-1BB or CD28 co-stimulatory domain plus inducible IL-18 (SEQ ID NOS:1659-1662), or also with a 1XX mutated CD3-zeta (SEQ ID NOS:1663-1666); murine or human 25E6 in a CAR with a 4-1BB or CD28 co-stimulatory domain plus inducible IL-18 (SEQ ID NOS:1667-1670), or also with a 1XX mutated CD3-zeta (SEQ ID NOS:1671-1674). In another aspect the cytokine is IL-7 and IL-15. In one case expression of the non-CAR species is induced by elements of an activated immune cell. In one aspect the element of an activated immune cell is an NFAT. In one aspect the NFAT is NFATc1, NFATc3 or NFATc2. Cytokines IL-7, IL-15, IL-12 and IL-18 are known to promote T cell persistence. In one aspect of the invention an immune cell described above is administered to a patient for the treatment or prevention of cancer. In one aspect of the invention, the cancer is a MUC1 positive cancer or a MUC1* positive cancer.

[0814] In addition to making CAR T cells that also induce expression of a cleavage enzyme, we made CAR T cells that also induce local and transient expression of IL-18. Many of the T cell based inducible systems reported insert the gene to be inducibly expressed into an IL-2 promoter or enhancer. We compared inducible expression off an IL-2 promoter/enhancer to inducible expression off of a portion of the Foxp3 enhancer. In this particular example, human T cells were transduced with both huMNC2-CAR44 and an NFAT inducible IL-18, wherein the I1-18 gene was either inserted into an IL-2 promoter or the Foxp3 enhancer region. It is known in the field that a major problem with CAR Ts with inducible second factors is that the second factor is leaky, meaning that significant expression of the second factor occurs without activation of the CAR T cell. The other problem with existing inducible systems is the length of time that goes by between when the CAR T cell is activated and the second factor is induced is typically very long so that the cell secreting the second factor may be far away from the tumor by the time the second factor is expressed.

[0815] FIG. 211A-211C show graphs of an ELISA experiment measuring the amount of IL-18 secreted into the condition media of huMNC2-CAR44 T cells, which also bear an NFAT inducible IL-18, co-cultured with MUC1* positive cancer cells. As a method of inducing varying levels of IL-18 expression, we co-cultured the CAR T cells with cancer cells doped with increasing amounts of cells that were engineered to express even more MUC1*. In these figures we show T47D cancer cells that are either wild-type, or doped with 5%, 10% or 30% of the T47D cells expressing more MUC1*. FIG. 211A shows the graph of IL-18 secreted into the supernatant of T47D breast cancer cells co-cultured with untransduced human T cells. FIG. 211B shows the graph of IL-18 secreted into the supernatant of T47D breast cancer cells co-cultured with huMNC2-CAR44 T cells that also bore an NFAT inducible IL-18 gene inserted into a portion of the Foxp3 enhancer. FIG. 211C shows the graph of IL-18 secreted into the supernatant of T47D breast cancer cells co-cultured with huMNC2-CAR44 T cells that also bore an NFAT inducible IL-18 gene inserted into a portion of the IL-2 enhancer. As can be seen in the figure, the Foxp3 system induces rapid and robust expression of IL-18, which is significantly faster and higher than that of the same construct in an IL-2 promoter. In this example, the IL-18 gene is inserted downstream of six (6) NFAT response elements, however one can attenuate the amount of the second factor by using a lesser number of response elements or enhance the amount by increasing the number of NFAT response elements.

[0816] It has been reported that IL-18 increases persistence of CAR T cells in vivo. However, we observed an unexpected result. In a dose-dependent manner, secretion of IL-18 increased the killing of low antigen density cells by the CAR T cells. We differentially labeled the T47D-wt cells (red: mCherry) and those T47Ds that were transduced to express more MUC1* (green: GFP). FIG. 212A-212X shows photographs of T47D breast cancer cells (red) doped with varying percentages of T47D cells engineered to express more MUC1* (green). The target cancer cells have been co-cultured with huMNC2-CAR44 T cells with NFAT inducible IL-18 wherein the IL-18 gene has been inserted into either the Foxp3 enhancer/promoter or the IL-2 enhancer/promoter. FIGS. 212A-212C, 212I-212K, and 212Q-212S show the cancer cells co-cultured with untransduced T cells. FIGS. 212D-212F, 212L-212N, and 212T-212V show the cancer cells co-cultured with hiMNC2-CAR44 T cells with the NFAT inducible IL-18 gene inserted into the Foxp3 enhancer/promoter. FIGS. 212G-212H, 2120-212P, and 212W-212X show the cancer cells co-cultured with hiMNC2-CAR44 T cells with the NFAT inducible IL-18 gene inserted into the IL-2 enhancer/promoter. As can be seen in the figure, the low antigen density T47D-wt type cells (red) are being killed when doped with higher percentages of cells that express more MUC1* and thus secrete more IL-18. The experiment shows that this is not just a bystander effect, because the cells expressing IL-18 off of the IL-2 promoter, which expresses much lower levels of IL-18, do not kill the low antigen density cells even when they are doped with 30% cells expressing more MUC1*.

[0817] We then showed that the CAR T mediated killing is specific for the CAR T specific antigen. We performed a similar experiment, wherein control, MUC1/MUC1* negative cells were doped with 5%, 10% or 30% of the T47D cells expressing more MUC1*, and co-cultured with MUC1* specific CAR T cells. FIG. 213A-213B shows graphs of ELISA experiments in which levels of IL-18 secreted into the conditioned media are measured for huMNC1-CAR44 T cells with NFAT inducible IL-18 gene, inserted into the Foxp3 enhancer or promoter, co-cultured with either MUC1* positive cancer cells or MUC1 negative non-cancerous cells. FIG. 213A shows IL-18 secretion from huMNC2-CAR44 T cells with NFAT inducible IL-18 in co-culture with T47D breast cancer cells where the population has been doped with 5%, 10% or 30% T47D cells that had been transfected with even more MUC1*. FIG. 213B shows IL-18 secretion from huMNC2-CAR44 T cells with NFAT inducible IL-18 in co-culture with non-cancerous, MUC1 negative HEK293 cells where the cell population has been doped with 5%, 10% or 30% T47D cells that had been transfected with more MUC1*. As can be seen in the figure, the amount of IL-18 secreted into the media can be attributed to the MUC1* positive cells that the population was doped with. Time course fluorescent photographs of the experiment show that even when doped with significant percentages of high antigen density MUC1* positive cells, the MUC1 negative cells are not killed by the MUC1* targeting CAR T cells. FIG. 214A-214X shows photographs of T47D breast cancer cells (red) or non-cancerous HEK293 cells (also red), where both cell types have been doped with varying percentages of T47D cells engineered to express more MUC1* (green). These target cancer cells have been co-cultured with huMNC2-CAR44 T cells with NFAT inducible IL-18 wherein the IL-18 gene has been inserted into the Foxp3 enhancer/promoter. FIG. 214A-214F shows either T47D cells or HEK293 cells that have not been doped with T47D cells engineered to express high MUC1* density. FIG. 214G-214L shows either T47D cells or HEK293 cells that have been doped with 5% T47D cells engineered to express high MUC1* density. FIG. 214M-214R shows either T47D cells or HEK293 cells that have been doped with 10% T47D cells engineered to express high MUC1* density. FIG. 2145-214X shows either T47D cells or HEK293 cells that have been doped with 30% T47D cells engineered to express high MUC1* density. FIGS. 214A-B, G-H, M-N, and S-T show T47D breast cancer cells. FIGS. 214C-F, I-L, O-R, and U-X show HEK293 cells. As can be seen in the figures, the induced secretion of IL-18 resulted in low MUC1* density T47D cells being killed but did not induce non-specific killing of the MUC1* negative HEK293 cells. Taken together these results show that the Foxp3 system is a superior system for the inducible expression of a second factor and especially useful in CAR T systems. Further we have demonstrated the unexpected result that IL-18 increases the killing of low antigen density cells without the unwanted effect of killing nearby MUC1/MUC1* negative cells.

[0818] In another aspect, the invention is directed to a composition that includes at least two different plasmids transfected into the same immune cell, wherein the first encodes a CAR comprising an antibody fragment, scFv or peptide that binds to the extra cellular domain of an antigen on the surface of a B cell and the other encodes a gene that is not a CAR, wherein the gene that is not a CAR is expressed from an inducible promoter that is activated by elements of an activated immune cell. In one aspect, the immune cell is a T cell or an NK cell. In one aspect the immune cell is derived from a stem cell that has been directed to differentiate to that immune cell type in vitro. In another aspect, a CAR containing sequences of the antibody are expressed in a stem cell, which then may be differentiated into an immune cell. In one aspect the CAR comprises an antibody fragment, scFv or peptide that binds to CD19. In another aspect the antibody fragment, scFv or peptide binds to a surface antigen of a B cell or a B cell precursor, or binds to CD19, CD20, CD22, BCMA, CD30, CD138, CD123, CD33 or LeY antigen. In one aspect the non-CAR species is a cleavage enzyme. In another aspect the non-CAR species is a cytokine. In one aspect, the Cytokine is IL-7. In one aspect the cytokine is IL-15. In another aspect the cytokine is IL-7 and IL-15. In one case expression of the non-CAR species is induced by elements of an activated immune cell. In one aspect the element of an activated immune cell is an NFAT. In one aspect the NFAT is NFATc1, NFATc3 or NFATc2. that is not a CAR, wherein the gene that is not a CAR is expressed from an inducible promoter wherein expression is induced by elements of an activated immune cell. In one aspect the immune cell transfected or transduced with the composition is administered to a patient for the treatment or prevention of cancer. In one case the cancer is a leukemia, lymphoma or blood cancer.

[0819] It is not intended for the invention to be limited by a specific method or technology for inserting the gene or plasmid comprising a sequence encoding a CAR or activated T cell inducible protein or peptide there encoded. For example, the gene encoding the CARs and activated T cell induced genes described herein can be virally transduced into an immune cell using viruses, which may or may not result in the CAR gene being integrated into the genome of the recipient cell. Virus delivery systems and viral vectors include but are not limited to retroviruses, including gamma-retroviruses, lentivirus, adenoviruses, adeno-associated viruses, baculoviruses, poxvirus, herpes simplex viruses, oncolytic viruses, HF10, T-Vec and the like. In addition to viral transduction, CARs and activated T cell induced genes described herein can be directly spliced into the genome of the recipient cell using methods such as CRISPR technology, CRISPR-Cas9 and -CPF1, TALEN, Sleeping Beauty transposon system, and SB 100×.

[0820] Bulky cell surface proteins such as MUC1-FL can also cause a steric hindrance problem for BiTEs. A BiTE is a two-headed bispecific antibody wherein one head binds to a T cell and the other head binds to a tumor-associated antigen. In this way, the BiTE links together the T cell and the tumor cells. The antibody that binds to the T cell should be an antibody that activates the T cell, such as an antibody against CD3 or CD28. To solve the steric hindrance problem, the linker between the T cell specific antibody and the tumor specific antibody is lengthened.

[0821] In another aspect of the invention, an anti-MUC1* single chain molecule is fused to a cleavage enzyme or a catalytically active fragment of a cleavage enzyme. In one aspect of the invention, the cleavage enzyme is MMP9 (SEQ ID NO:643). In another aspect of the invention, the enzyme is a catalytically active fragment of MMP9 (SEQ ID NO:645). In some cases, the antibody fragment of the CAR is chosen for its ability to recognize MUC1* when cleaved by that specific cleavage enzyme. In one embodiment, the cleavage enzyme is MMP9, MMP3, MMP14, MMP2, ADAM17, ADAM TS16, and/or ADAM28. In one embodiment, the antibody or antibody fragment binds to a peptide having the sequence of (PSMGFR) GTINVHDVETQFNQYKTEAASRYNLTISDVSVSDVPFPFSAQSGA, PSMGFR N-10, QFNQYKTEAASRYNLTISDVSVSDVPFPFSAQSGA, or PSMGFR N+20 SNIKFRPGSVVVQLTLAFREGTINVHDVETQFNQYKTEAASRYNLTISDVSVSDVPFP FSAQSGA. In another embodiment, cleavage enzymes MMP9 and MMP3 are transduced into a T cell that is also transduced with a CAR with an antibody fragment that is a fragment of MNC2.

[0822] In many cases it is desirable to have the cleavage enzyme expressed only after an immune cell recognizes the tumor-associated target on a solid tumor. In this way, the cleavage enzyme will not freely move throughout the body, cleaving MUC1, MUC16 or other proteins, wherein their cleavage could actually promote cancer. However, there are cancers that are physically accessible to direct application of chemotherapy agents, CAR T cells and other anti-cancer agents. For example, types of brain cancers, prostate cancer and ovarian cancers have all shown the benefit of direct application of anti-cancer agents into the local vicinity of the cancer. CAR T cells have been injected directly into the brain and/or cerebral spinal fluid of glioblastoma patients. Radiation has been directed to the prostate area for the treatment of prostate cancers, including those that have metastasized. Hot chemo therapy agents have been directly injected into the intraperitoneal cavity for the treatment of ovarian cancers. In these and other cases, where the cancers that are physically accessible to direct application of chemotherapy agents, a cleavage enzyme is administered in the presence or absence of another anti-cancer agent, which could be a CAR T cell, an immune cell engineered to recognize a tumor-associated antigen, a BiTE, an ADC, a biological or a standard chemotherapy agent. Although ovarian cancer can metastasize to anywhere in the body, it usually stays in the abdomen as it spreads to adjacent organs, such as the intestines, liver and stomach. This makes ovarian cancer an ideal test case for improving the effect of anti-cancer agents by administering a cleavage enzyme in combination with other anti-cancer agents, including a platinum-based drug such as carboplatin (Paraplatin) or cisplatin, and/or a taxane such as paclitaxel (Taxol) or docetaxel (Taxotere). Alkeran (Melphalan), Avastin (Bevacizumab), Carboplatin, Clafen (Cyclophosphamide), and Cytoxan have all been approved for the treatment of ovarian cancer. Other treatments that are being tested for the treatment of ovarian cancers include agents that target MUC1, MUC16 and as described herein, MUC1*.

[0823] Other cleavage enzymes can be used in addition to or in place of MMP9. MMP14 for example, has been shown to efficiently cleave MUC1 to MUC1* (FIG. 38). In one aspect of the invention, MMP14 is expressed in an immune cell that is also engineered to express a CAR. In one case the CAR is an anti-MUC1* CAR. For example, it can be an MNC2-CAR44 transduced T cell. In another aspect of the invention, the MMP14 is directly administered to the patient either in the location of the tumor or by i.v.

[0824] In yet another aspect of the invention, the cancer is an ovarian cancer and either MMP9 or MMP14 is directly injected into the abdominal area along with an anti-cancer agent, which can be a chemotherapy agent, a biological, an anti-MUC1* CAR T or an anti-MUC16 CAR T.

[0825] In addition to local administration of the cleavage enzyme, + iv administration alone or secreted from an immune cell, which may be a CAR T cell, which further may be expressed off of an inducible promoter is contemplated.

### Methods Used in Carrying Out Experimentation in Relation to the Present Invention

### 1. Lentivirus Production and Viral Transduction of Immune Cells

[0826] HEK293 or HEK293T cells (ATCC) were used to produce lentivirus. The day prior transfection plates (6well plate) were coated with poly-D-lysine and cells seeded so that cell density reaches 90-95% at the time of transfection and cultures in a 5% CO₂ atmosphere. The next day cells were transfected with Lipofectamine 3000 (life technologies) and Opti-MEM® I Reduced Serum Medium according to the manufacturer instructions (0.75 ug of lentiviral expression vector and 2.25 ug of pPACKH1 packaging mix was used). After 6 h incubation, the media was changed and media containing lentivirus was harvested after 24 and 48 hours. Lentivirus was concentrated with Lenti-X concentrator (Clontech) and titer was calculated using the Lenti-X p@4 Rapid Titer Kit (Clontech). Lentivirus was store at −80 C in single-use aliquots.

Transduction of Immune Cells with Constructs Including CARs

[0827] Human T cells, if frozen, were thawed and pre-warmed in 100-200 units IL-2 and TexMACS medium, 20 ml, and pelleted by centrifugation. Cells were resuspended in 10 ml of medium and cultured at 37° C., 5% CO₂ at 1×10⁶ cells/ml in complete medium with anti-CD3/anti-CD28 beads (TransAct kit).

[0828] After 4 days in culture, cells were counted and 450 ul of cell suspension was placed in single well of a 24-well plate at a density of approximately 1×10⁶ cells/ml. Cells were allowed to settle. 150 ul was carefully removed from the top of each well. To each well was added an appropriate dilution of lentiviral vector, diluted in plain TexMACS medium, along with protamine sulfate to a final concentration of 10 ug/ml, in a 150 ul volume, for a final total volume of 450 ul per well and incubated for 24 hrs. Transduced cells were removed, pelleted by centrifugation, and resuspended in fresh medium, adjusting cell density, not to exceed 1.0×10⁶ cells/ml. Transduced T cells can be expanded and frozen or used directly. Typically transduced T cells are used or frozen between Day 7 and Day 20 post activation with IL-2 and TransAct media.

### 2. Comparing Anti-MUC1* CAR T Cell Activity in the Presence or Absence of Exogenous Cleavage Enzymes

[0829] Human T cells (ALLCELLS) were transduced with huMNC2-CAR44 or huMNC2-CAR50. CAR44 is huMNC2-scFv-CD8-CD8 (transmembrane-41BB-3z). CAR50 is the same as CAR44 except that CAR50 has a murine MNC2-scFv and a CD4 transmembrane domain. The CAR T cells were incubated for 18 hours with target and non-target cells that have been dyed red using CMTMR. When T cells recognize a target cell, they cluster the target cells and begin to kill them. As can be seen in FIGS. 45-47 the CAR T cells effectively cluster and kill the target MUC1* positive cancer cells. FIG. 45 shows huMNC2-CAR44 or huMNC2-CAR50 T cells being co-cultured with HCT-116 cells transduced to express MUC1*, “HCT-MUC1*” or with HCT-116 cells transduced with a full-length MUC1, “HCT-MUC1-41TR”. Recall that MNC2 recognizes an ectopic epitope that is only revealed after cleavage and release of the MUC1 tandem repeat domain. Neither huMNC2-CAR44 nor huMNC2-CAR50 T cells recognize the cells expressing full-length MUC1 (FIG. 45F-45H). However, when MMP9 plus activator APMA is added, the CAR T cells recognize the cells, cluster and kill them (FIG. 45J-45L). The addition of cleavage enzyme ADAM-17 did not affect the recognition of either CAR T cell for full-length MUC1 (FIG. 45N-45P). The reason could be that ADAM-17 doesn't cleave MUC1 or the cleavage product is not recognized by MNC2. A similar experiment was performed (FIG. 46) that showed that MMP2 was only weakly effective at either cleavage MUC1 or that the MMP2 cleavage product was only weakly recognized by MNC2. FIG. 47 shows the contrast between huMNC2-CAR44 recognition of HCT-MUC1* cells, T47D-wt breast cancer cells, and T47D cells with added MMP9 which presumably cleaves the full-length MUC1 to an MNC2 recognizable MUC1*.

### 3. Confocal Imaging of CAR T Cells Giving the “Kiss of Death” to MUC1* Positive Cancer Cells

[0830] Confocal images of Human T cells that were transduced with huMNC2-CAR44, co-cultured for 24 hours with MUC1* positive DU145 prostate cancer cells showed the CAR T cells inserting Granzyme B into the target cancer cells. FIG. 55 shows fluorescent images of the huMNC2-CAR44 T cells secreting Granzyme B when co-cultured with the prostate cancer cells, FACS analysis showing increased expression of Granzyme B by the CAR T cells and an xCELLigence experiment showing that the target prostate cancer cells were in fact killed.

### 5. Analysis of CAR T Cell Induced Killing of MUC1* Positive Cancer Cells by FACS Analysis

[0831] We have demonstrated the killing effect of huMNC2-CAR44 T cells on T47D MUC1* positive breast cancer cells, wherein the breast cancer cells have been transfected with increasing amounts of additional MUC1*. The killing effect of the huMNC2-CAR44 T cells increases as the amount of target MUC1* expressed on the cells increases.

[0832] IFN-γ secretion in media was measured using a human IFN-γ ELISA kit (Biolegend). Plates were coated with an anti-IFN-γ antibody (capture antibody, 1× in coating buffer). After overnight incubation at 4° C., the plate was washed 4 times with PBS-T and blocking solution was added to block remaining binding site on the well. After 1 h at RT (shaking at 500 rpm) the plate was washed 4 times with PBS-T and conditioned media (CM) and IFN-γ standard, was added. After 2 h at RT with shaking, the plate was washed 4 times with PBS-T and detection antibody (1×), was added. After 1 h at RT with shaking, the plate was washed 4 times with PBS-T and Avidin-HRP (1×) was added. After 30 min at RT with shaking, the plate was washed 5 times with PBS-T (soak 1 min each wash) and TMB substrate solution was added. The reaction was stopped after 20 min by adding the stop solution and absorbance was read at 450 nm (minus absorbance at 570 nm) within 15 min of stopping.

### 6. Analysis of CAR T Cell Induced Killing of MUC1* Positive Cancer Cells by xCELLigence

[0833] In addition to FACS analysis, many researchers now use an xCELLigence instrument to measure CAR T killing of cancer cells. The xCELLigence instrument uses electrode arrays upon which cancer cells are plated. The adherent cancer cells insulate the electrode and so cause an increase in impedance as they grow. Conversely, T cells are not adherent and remain in suspension so do not contribute to insulation of the electrode which would increase impedance. However, if the T cells or CAR T cells kill the cancer cells on the electrode plate, the cancer cells ball up and float off as they die, which causes the impedance to decrease. The xCELLigence instrument measures impedance as a function of time, which is correlated to cancer cell killing. In addition, the electrode plates also have a viewing window. When CAR T cells effectively kill the adsorbed target cancer cells, there is a decrease in impedance but also one can see that there are no cancer cells left on the plate surface.

[0834] In most of the XCELLigence experiments, 5,000 cancer cells were plated per well of a 96-well electrode array plate. Cells were allowed to adhere and grow for 24 hours. CAR T cells were then added at an Effector to Target ratio (E:T) of 0.5:1, 1:1, 2:1, 5:1, 10:1 and sometimes 20:1. The E:T ratio assumes 100% transduction of the CAR into the T cells, when the actual transduction efficiency is 40%.

[0835] The xCELLigence instrument records impedance as a function of time and experiments can go on for up to 7 days.

[0836] FIG. 48, FIG. 49, FIG. 55H, FIG. 56H, FIGS. 57A-57C, all show results of CAR T and cancer cell experiments performed on an xCELLigence instrument.

### 7. Anti-MUC1* CAR T Cell Therapy in Mice Bearing Human Tumors

[0837] Female NOD/SCID/GAMMA (NSG) mice between 8-12 weeks of age were implanted with 500,000 human cancer cells, wherein the cancer cells had previously been stably transfected with Luciferase. Mice bearing Luciferase positive cells can be injected with the enzyme's substrate Luciferin just prior to imaging, which makes the cancer cells fluoresce. The cancer cells are imaged in live mice within 10-15 minutes after injection with Luciferin on an IVIS instrument. The readout is flux or photons per second. Tumors were allowed to engraft until tumors were clearly visible by IVIS.

[0838] FIGS. 58A-58F show fluorescent photographs of mice taken on an IVIS instrument. 10 minutes prior to IVIS photographs, mice were injected intraperitoneally (IP) with Luciferin, which fluoresces after cleavage by Luciferase, thus making tumor cells fluoresce. NSG (NOD/SCID/GAMMA) immune compromised mice that on Day 0 were subcutaneously implanted on the flank with 500,000 human MUC1* positive cancer cells that had been stably transfected with Luciferase. Tumors were allowed to engraft. On Day 7 after IVIS measurement, animals were tail vein injected with either PBS, 10 million untransduced human T cells or 8.5M huMNC2-scFv-CAR44 T cells. As can be seen in the figure, control mice had to be sacrificed on Day 20 due to excess tumor burden (FIG. 58A-58B). huMNC2-CAR44 T cell treated mice were tumor free after a single CAR T cell injection until Day 100 when they were sacrificed (FIG. 58C). FIG. 58E shows Kaplan-Meier survival curves that demonstrate the efficacy of T cell therapy guided by anti-MUC1* antibody. FIG. 58F shows a table summarizing the characteristics of the human T cells that were collected from the test mice upon sacrifice. The starting Car T cell population was 50% CD4 positive helper T cells and 50% CD8 positive killer T cells. As can be seen in the table, the percent of CD8 positive cells has increased in the CAR T treated group, indicating in vivo expansion of that group of cells, which is an indicator of efficacy. We also note that in the treated group, the CAR T cells express higher levels of PD1 which is a marker of T cell exhaustion.

[0839] In another animal experiment, NSG mice were sub-cutaneously implanted into the flank with 500,000 tumor cells then injected on Day 7 and again on Day 14 with either saline solution, PBS, or 10M huMNC2-CAR44 T cells (FIG. 59A-59C). In this experiment the amount of MUC1* expressed on the tumor cells was varied. In one case, the tumor cells that were implanted were T47D-wildtype (FIG. 59B). In another case, the T47D cells were doped with 95% T47D cells that had been transfected to express even more MUC1* (FIG. 59C). As can be seen, the tumors comprised of cells expressing more MUC1* were eliminated more quickly and did not recur. In a similar experiment, the tumor cells were doped with a relatively small amount of cells that expressed more MUC1*. FIG. 60A-60C shows NSG mice implanted with T47D-wt breast cancer cells that have been doped with 30% of T47D cells transfected to express more MUC1*. As can be seen, even a small percentage of cells expressing high levels of MUC1* is sufficient to trigger CAR T cell mediated killing of the entire tumor. Naturally occurring tumors are heterogeneous and are comprised of both high and low antigen expressing cells. This experiment indicates that huMNC2-CAR44 T cells would be effective in eradicating naturally occurring tumors.

[0840] FIGS. 61A-61J show fluorescent photographs of mice taken on an IVIS instrument. NSG (NOD/SCID/GAMMA) immune compromised mice that on Day 0 were subcutaneously injected into the flank with 500K human BT-20 cells which are a MUC1* positive triple negative breast cancer cell line. The cancer cells had been stably transfected with Luciferase. Tumors were allowed to engraft. On Day 6 after IVIS measurement, animals were given a one-time injection of 10 million of either human T cells transduced with huMNC2-scFv-CAR44 or untransduced T cells. 5 million T cells were injected intra-tumor and 5 million were injected into the tail vein. 10 minutes prior to IVIS photographs, mice were IP injected with Luciferin. In one case the huMNC2-CAR44 T cells were first incubated with beads to which was attached the PSMGFR peptide to pre-stimulate the T cells and in the figure is marked Protocol 1. In Protocol 2, the huMNC2-CAR44 T cells were pre-stimulated with live tumor cells, which likely injected more tumor cells into the animals' circulation.

[0841] FIGS. 62A-62M show fluorescent photographs of mice taken on an IVIS instrument. NSG (NOD/SCID/GAMMA) immune compromised mice that on Day 0 were injected into the intraperitoneal cavity (IP) with 500K human SKOV-3 cells which are a MUC1* positive ovarian cancer cell line. The cancer cells had been stably transfected with Luciferase. Tumors were allowed to engraft. On Day 3 after IVIS measurement, animals were IP injected with 10M either human T cells transduced with huMNC2-CAR44 T cells, untransduced T cells or PBS. Animals were IVIS imaged again on Day 7. 10 minutes prior to IVIS photographs, mice were IP injected with Luciferin. As can be seen in the figure the anti-MUC1* CAR T cells effectively reduced ovarian tumor volume by Day 15.

### 9. NFAT-Induced IL-18 Sequences and Cloning

Cloning of IL18 in pGL4-14 3×NFAT:

[0842] An activated IL18 (SEQ ID NO:1644) was synthesized with the CD8 leader sequence. The pGL4-14 3×IL2 NFAT and pGL4-14 3×FoxP3 NFAT were digested with XhoI and HindIII restriction enzymes (New England Biolabs). The purified plasmids and the synthesized IL18 sequences were assembled using the Gibson assembly cloning kit (New England Biolab). The resulting constructs (pGL4-14 3×IL2NFAT-IL18 and pGL4-14 3×FoxP3NFAT-IL18) contains 3 repeats of NFAT response element (IL2 or FoxP3) followed by a minimum promoter (mCMV: SEQ ID NO:1634) and IL18 (SEQ ID NOS:1752-1753) with CD8 leader sequence.

Cloning of MNC2 CAR with IL18 in pCDNA vector:

[0843] MNC2 CAR sequence was amplified from previously made vector by polymerase chain reaction (PCR) using the following primers: 5′-agggagacccaagctggctagttaagcttggatggccttaccagtgaccgccttgc-3′ (SEQ ID NO:1754) and 5′-taggccagagaaatgttctggcattatcagcgagggggcagggcctgc-3′ (SEQ ID NO:1755).

[0844] IL18 sequence including NFAT response element was amplify from pGL4-14 3×NFAT-IL18 by polymerase chain reaction (PCR) using the following primers: 5′-tgccagaacatttctctgg-3′ (SEQ ID NO: 1756) and 5′-acagtcgaggctgatcagcgggtttaaacttatcagtcctcgttctgcacgg-3′ (SEQ ID NO: 1757). The purified PCR fragments and digested pCDNA 3.1 V5 (ThermoFisher scientific) were assembled using the Gibson assembly cloning kit (New England Biolab) to create the construct pCDNA MNC2CAR-3×IL2NFAT-IL18 and pCDNA MNC2CAR-3×FoxP3NFAT-IL18.

### Cloning of MNC2 CAR-NFAT-IL18 in Lentivector:

[0845] MNC2 CAR-NFAT-IL18 sequence was amplified from pCDNA MNC2CAR-3×IL2NFAT-IL18 and pCDNA MNC2CAR-3×FoxP3NFAT-IL18.by polymerase chain reaction (PCR) using the following primers: 5′-atgcaggccctgccccctcgctgataagtttaaactgccagaacatttctctggcctaac-3′ (SEQ ID NO:1758) and 5′-accggagcgatcgcagatccttcgcggccgcttatcagtcctcgttctgcacggtgaac-3′ (SEQ ID NO:1759). The purified PCR fragments and digested pCDH Dual Hygro (System Biosciences, CA) were assembled using the Gibson assembly cloning kit (New England Biolab) to create the construct pCDH MNC2CAR-3×IL2NFAT-IL18 and pCDH MNC2CAR-3×FoxP3NFAT-IL18.

Creation of Lentivector with MSCV Promoter

[0846] MSCV promoter sequence was amplified from pCDH-MSCV-MCS-EF1a-GFP (System Biosciences).by polymerase chain reaction (PCR) using the following primers: 5′-attgcactagttgaaagaccccacctgtagg-3′ (SED ID NO:1760) and 5′-aatgctctagaatacgggtatccagg-3′ (SEQ ID NO:1761). After digestion with Spel and XbaI restriction enzymes (New England Biolabs), the purified fragment was cloned into pCDH CMV MCS (System Bioscience) digested with the same restriction enzymes to create the construct pCDH MSCV MCS.

Cloning of MNC2 CAR-NFAT-IL18 in pCDH MSCV MCS:

[0847] MNC2 CAR-IL2NFAT-IL18 sequence was amplified from pCDNA MNC2CAR-3×IL2NFAT-IL18 by polymerase chain reaction (PCR) using the following primers: 5′ atagcgaattcgtaccgagggccaccatgg-3′ (SEQ ID NO:1762) and 5′-taggcctcccaccgtacacgcctaggtaccacgccttctgtatg-3′ (SEQ ID NO:1763) MNC2 CAR-IL2NFAT-IL18 sequence was amplified from pCDNA MNC2CAR-3×FoxP3NFAT-IL18 by polymerase chain reaction (PCR) using the following primers: 5′ atagcgaattcgtaccgagggccaccatgg -3′ (SEQ ID NO:1762) and 5′-taggcctcccaccgtacacgcctaggtacctctgcagtaaatgg-3′ (SEQ ID NO: 1764). After digestion with EcoRI and KpnI restriction enzymes (New England Biolabs), the purified fragment was cloned into pCDH MSCV MCS digested with the same restriction enzymes to create the construct pCDH MSCV MNC2CAR-3×IL2NFAT-IL18 and pCDH MSCV MNC2CAR-3×FoxP3NFAT-IL18.

### Cloning of 6×NFAT Response Elements:

[0848] 6×NFAT (IL2 and FoxP3) response element were synthesized followed by different minimal promoter: mCMV (SEQ ID NO:1634), mIL2P (SEQ ID NO: 1635) and miniP (SEQ ID NO:1636). A total of six 6 sequences were synthesized: SEQ ID NOS: 1768-1779.

[0849] 6×NFAT sequences were amplified by polymerase chain reaction (PCR) using the following primers: 5′-tgccagaacatttctctgg-3′ (SEQ ID NO:1756) and 5′-taaggccatggtggctagc-3′ (SEQ ID NO:1765). The purified PCR fragments and digested (KpnI and XhoI) pCDNA MNC2CAR 3×NFAT IL18 were assembled using the Gibson assembly cloning kit (New England Biolab) to create constructs with 6× NFAT response elements in place of the 3× NFAT response elements.

[0850] 6×NFAT sequences were amplified, from the pCDNA vector created above, by polymerase chain reaction (PCR) using the following primers: 5′-aataagtttaaactgccagaacatttctctgg-3′ (SEQ ID NO: 1766) and 5′-atatagcggccgcttatcagtcctcgttctgcacgg-3′ (SEQ ID NO:1767). After digestion with PmeI and NotI restriction enzymes (New England Biolabs), the purified fragments were cloned into pCDH MSCV MNC2CAR digested with the same restriction enzymes to create the construct pCDH MSCV MNC2CAR-6×IL2NFAT-IL18 and pCDH MSCV MNC2CAR-6×FoxP3NFAT-IL18. For each construct 3 minimal promoter were tested.

[0851] Those skilled in the art will recognize, or be able to ascertain using no more than routine experimentation, many equivalents to the specific embodiments of the invention specifically described herein.

The application's sequence listing, which the Patent Office published only in electronic form, follows.

SEQUENCE LISTING (1879 sequences)

SEQ ID NO: 1 - protein, 1255 aa, Homo sapiens
MTPGTQSPFFLLLLLTVLTVVTGSGHASSTPGGEKETSATQRSSVPSSTEKNAVSMTSSVLSSHSPGSGSSTTQGQDVTLAPATEPASGSAATWGQDVTSVPVTRPALGSTTPPAHDVTSAPDNKPAPGSTAPPAHGVTSAPDTRPAPGSTAPPAHGVTSAPDTRPAPGSTAPPAHGVTSAPDTRPAPGSTAPPAHGVTSAPDTRPAPGSTAPPAHGVTSAPDTRPAPGSTAPPAHGVTSAPDTRPAPGSTAPPAHGVTSAPDTRPAPGSTAPPAHGVTSAPDTRPAPGSTAPPAHGVTSAPDTRPAPGSTAPPAHGVTSAPDTRPAPGSTAPPAHGVTSAPDTRPAPGSTAPPAHGVTSAPDTRPAPGSTAPPAHGVTSAPDTRPAPGSTAPPAHGVTSAPDTRPAPGSTAPPAHGVTSAPDTRPAPGSTAPPAHGVTSAPDTRPAPGSTAPPAHGVTSAPDTRPAPGSTAPPAHGVTSAPDTRPAPGSTAPPAHGVTSAPDTRPAPGSTAPPAHGVTSAPDTRPAPGSTAPPAHGVTSAPDTRPAPGSTAPPAHGVTSAPDTRPAPGSTAPPAHGVTSAPDTRPAPGSTAPPAHGVTSAPDTRPAPGSTAPPAHGVTSAPDTRPAPGSTAPPAHGVTSAPDTRPAPGSTAPPAHGVTSAPDTRPAPGSTAPPAHGVTSAPDTRPAPGSTAPPAHGVTSAPDTRPAPGSTAPPAHGVTSAPDTRPAPGSTAPPAHGVTSAPDTRPAPGSTAPPAHGVTSAPDTRPAPGSTAPPAHGVTSAPDTRPAPGSTAPPAHGVTSAPDTRPAPGSTAPPAHGVTSAPDTRPAPGSTAPPAHGVTSAPDTRPAPGSTAPPAHGVTSAPDTRPAPGSTAPPAHGVTSAPDTRPAPGSTAPPAHGVTSAPDTRPAPGSTAPPAHGVTSAPDTRPAPGSTAPPAHGVTSAPDNRPALGSTAPPVHNVTSASGSASGSASTLVHNGTSARATTTPASKSTPFSIPSHHSDTPTTLASHSTKTDASSTHHSSVPPLTSSNHSTSPQLSTGVSFFFLSFHISNLQFNSSLEDPSTDYYQELQRDISEMFLQIYKQGGFLGLSNIKFRPGSVVVQLTLAFREGTINVHDVETQFNQYKTEAASRYNLTISDVSVSDVPFPFSAQSGAGVPGWGIALLVLVCVLVALAIVYLIALAVCQCRRKNYGQLDIFPARDTYHPMSEYPTYHTHGRYVPPSSTDRSPYEKVSAGNGGSSLSYTNPAVAAASANL

SEQ ID NO: 2 - protein, 45 aa, Artificial Sequence
  PSMGFR sequence
GTINVHDVETQFNQYKTEAASRYNLTISDVSVSDVPFPFSAQSGA

SEQ ID NO: 3 - protein, 35 aa, Artificial Sequence
  N-10 peptide
QFNQYKTEAASRYNLTISDVSVSDVPFPFSAQSGA

SEQ ID NO: 4 - protein, 26 aa, Artificial Sequence
  N-19 peptide
ASRYNLTISDVSVSDVPFPFSAQSGA

SEQ ID NO: 5 - protein, 22 aa, Artificial Sequence
  N-23 peptide
NLTISDVSVSDVPFPFSAQSGA

SEQ ID NO: 6 - protein, 19 aa, Artificial Sequence
  N-26 peptide
ISDVSVSDVPFPFSAQSGA

SEQ ID NO: 7 - protein, 15 aa, Artificial Sequence
  N-30 peptide
SVSDVPFPFSAQSGA

SEQ ID NO: 8 - protein, 30 aa, Artificial Sequence
  N-10/C-5 peptide
QFNQYKTEAASRYNLTISDVSVSDVPFPFS

SEQ ID NO: 9 - protein, 21 aa, Artificial Sequence
  N-19/C-5 peptide
ASRYNLTISDVSVSDVPFPFS

SEQ ID NO: 10 - protein, 9 aa, Artificial Sequence
  N-36 peptide
FPFSAQSGA

SEQ ID NO: 11 - skipped

SEQ ID NO: 12 - DNA, 366 bp, Artificial Sequence
  Mouse E6 Heavy chain variable region sequence
gaggtgaaggtggtggagtctgggggagacttagtgaagcctggagggtccctgaaactctcctgtgtagtctctggattcactttcagtagatatggcatgtcttgggttcgccagactccaggcaagaggctggagtgggtcgcaaccattagtggtggcggtacttacatctactatccagacagtgtgaaggggcgattcaccatctccagagacaatgccaagaacaccctgtacctgcaaatgagcagtctgaagtctgaggacacagccatgtatcactgtacaagggataactacggtaggaactacgactacggtatggactactggggtcaaggaacctcagtcaccgtctcctca

SEQ ID NO: 13 - protein, 122 aa, Artificial Sequence
  Mouse E6 Heavy chain variable region sequence
EVKVVESGGDLVKPGGSLKLSCVVSGFTFSRYGMSWVRQTPGKRLEWVATISGGGTYIYYPDSVKGRFTISRDNAKNTLYLQMSSLKSEDTAMYHCTRDNYGRNYDYGMDYWGQGTSVTVSS

SEQ ID NO: 14 - DNA, 75 bp, Artificial Sequence
  Mouse E6 heavy chain variable framework region 1 (FWR1) sequence
gaggtgaaggtggtggagtctgggggagacttagtgaagcctggagggtccctgaaactctcctgtgtagtctct

SEQ ID NO: 15 - protein, 30 aa, Artificial Sequence
  Mouse E6 heavy chain variable framework region 1 (FWR1) sequence
EVKVVESGGDLVKPGGSLKLSCVVSGFTFS

SEQ ID NO: 16 - DNA, 30 bp, Artificial Sequence
  Mouse E6 heavy chain variable complementarity determining regions 1 (CDR1) sequence
ggattcactttcagtagatatggcatgtct

SEQ ID NO: 17 - protein, 5 aa, Artificial Sequence
  Mouse E6 heavy chain variable complementarity determining regions 1 (CDR1) sequence
RYGMS

SEQ ID NO: 18 - DNA, 42 bp, Artificial Sequence
  Mouse E6 heavy chain variable framework region 2 (FWR2) sequence
tgggttcgccagactccaggcaagaggctggagtgggtcgca

SEQ ID NO: 19 - protein, 14 aa, Artificial Sequence
  Mouse E6 heavy chain variable framework region 2 (FWR2) sequence
WVRQTPGKRLEWVA

SEQ ID NO: 20 - DNA, 51 bp, Artificial Sequence
  Mouse E6 heavy chain variable complementarity determining regions 2 (CDR2) sequence
accattagtggtggcggtacttacatctactatccagacagtgtgaagggg

SEQ ID NO: 21 - protein, 17 aa, Artificial Sequence
  Mouse E6 heavy chain variable complementarity determining regions 2 (CDR2) sequence
TISGGGTYIYYPDSVKG

SEQ ID NO: 22 - DNA, 96 bp, Artificial Sequence
  Mouse E6 heavy chain variable framework region 3 (FWR3) acid sequence
cgattcaccatctccagagacaatgccaagaacaccctgtacctgcaaatgagcagtctgaagtctgaggacacagccatgtatcactgtacaagg

SEQ ID NO: 23 - protein, 32 aa, Artificial Sequence
  Mouse E6 heavy chain variable framework region 3 (FWR3) acid sequence
RFTISRDNAKNTLYLQMSSLKSEDTAMYHCTR

SEQ ID NO: 24 - DNA, 39 bp, Artificial Sequence
  Mouse E6 heavy chain variable complementarity determining regions 3 (CDR3) sequence:
gataactacggtaggaactacgactacggtatggactac

SEQ ID NO: 25 - protein, 13 aa, Artificial Sequence
  Mouse E6 heavy chain variable complementarity determining regions 3 (CDR3) sequence:
DNYGRNYDYGMDY

SEQ ID NO: 26-37 - skipped (12 entries)

SEQ ID NO: 38 - DNA, 366 bp, Artificial Sequence
  Humanized E6 heavy chain variable region sequence from IGHV3-21*03
gaggtgcagctggtggagtctgggggaggcctggtcaagcctggggggtccctgagactctcctgtgcagcctctggattcaccttcagtaggtatggcatgagctgggtccgccaggctccagggaagaggctggagtgggtctcaaccattagtggcggaggcacctacatatactacccagactcagtgaagggccgattcaccatctccagagacaacgccaagaacaccctgtatctgcaaatgaacagcctgagagccgaggacacggctgtgtattactgtaccagagataactatggccgcaactatgattatggcatggattattggggccagggcaccctggtgaccgtgagcagc

SEQ ID NO: 39 - protein, 122 aa, Artificial Sequence
  Humanized E6 heavy chain variable region sequence from IGHV3-21*03
EVQLVESGGGLVKPGGSLRLSCAASGFTFSRYGMSWVRQAPGKRLEWVSTISGGGTYIYYPDSVKGRFTISRDNAKNTLYLQMNSLRAEDTAVYYCTRDNYGRNYDYGMDYWGQGTLVTVSS

SEQ ID NO: 40 - DNA, 90 bp, Artificial Sequence
  Humanized E6 heavy chain variable framework region 1 (FWR1) acid sequence
gaggtgcagctggtggagtctgggggaggcctggtcaagcctggggggtccctgagactctcctgtgcagcctctggattcaccttcagt

SEQ ID NO: 41 - protein, 30 aa, Artificial Sequence
  Humanized E6 heavy chain variable framework region 1 (FWR1) acid sequence
EVQLVESGGGLVKPGGSLRLSCAASGFTFS

SEQ ID NO: 42 - DNA, 15 bp, Artificial Sequence
  Humanized E6 heavy chain variable complementarity determining regions 1 (CDR1) sequence
aggtatggcatgagc

SEQ ID NO: 43 - protein, 5 aa, Artificial Sequence
  Humanized E6 heavy chain variable complementarity determining regions 1 (CDR1) sequence
RYGMS

SEQ ID NO: 44 - DNA, 42 bp, Artificial Sequence
  Humanized E6 heavy chain variable framework region 2 (FWR2) acid sequence
tgggtccgccaggctccagggaagaggctggagtgggtctca

SEQ ID NO: 45 - protein, 14 aa, Artificial Sequence
  Humanized E6 heavy chain variable framework region 2 (FWR2) acid sequence
WVRQAPGKRLEWVS

SEQ ID NO: 46 - DNA, 51 bp, Artificial Sequence
  Humanized E6 heavy chain variable complementarity determining regions 2 (CDR2) sequence
accattagtggcggaggcacctacatatactacccagactcagtgaagggc

SEQ ID NO: 47 - protein, 17 aa, Artificial Sequence
  Humanized E6 heavy chain variable complementarity determining regions 2 (CDR2) sequence
TISGGGTYIYYPDSVKG

SEQ ID NO: 48 - DNA, 96 bp, Artificial Sequence
  Humanized E6 heavy chain variable framework region 3 (FWR3) acid sequence
cgattcaccatctccagagacaacgccaagaacaccctgtatctgcaaatgaacagcctgagagccgaggacacggctgtgtattactgtaccaga

SEQ ID NO: 49 - protein, 32 aa, Artificial Sequence
  Humanized E6 heavy chain variable framework region 3 (FWR3) acid sequence
RFTISRDNAKNTLYLQMNSLRAEDTAVYYCTR

SEQ ID NO: 50 - DNA, 39 bp, Artificial Sequence
  Humanized E6 heavy chain variable complementarity determining regions 3 (CDR3) sequence
gataactatggccgcaactatgattatggcatggattat

SEQ ID NO: 51 - protein, 13 aa, Artificial Sequence
  Humanized E6 heavy chain variable complementarity determining regions 3 (CDR3) sequence
DNYGRNYDYGMDY

SEQ ID NO: 52 - DNA, 1442 bp, Artificial Sequence
  Humanized E6 IgG2 heavy chain synthesized by Genescript
gaattctaagcttgggccaccatggaactggggctccgctgggttttccttgttgctattttagaaggtgtccagtgtgaggtgcagctggtggagtctgggggaggcctggtcaagcctggggggtccctgagactctcctgtgcagcctctggattcaccttcagtaggtatggcatgagctgggtccgccaggctccagggaagaggctggagtgggtctcaaccattagtggcggaggcacctacatatactacccagactcagtgaagggccgattcaccatctccagagacaacgccaagaacaccctgtatctgcaaatgaacagcctgagagccgaggacacggctgtgtattactgtaccagagataactatggccgcaactatgattatggcatggattattggggccagggcaccctggtgaccgtgagcagcgcctccaccaagggcccatcggtcttccccctggcgccctgctccaggagcacctccgagagcacagccgccctgggctgcctggtcaaggactacttccccgaaccggtgacggtgtcgtggaactcaggcgctctgaccagcggcgtgcacaccttcccagctgtcctacagtcctcaggactctactccctcagcagcgtggtgaccgtgccctccagcaacttcggcacccagacctacacctgcaacgtagatcacaagcccagcaacaccaaggtggacaagacagttgagcgcaaatgttgtgtcgagtgcccaccgtgcccagcaccacctgtggcaggaccgtcagtcttcctcttccccccaaaacccaaggacaccctcatgatctcccggacccctgaggtcacgtgcgtggtggtggacgtgagccacgaagaccccgaggtccagttcaactggtacgtggacggcgtggaggtgcataatgccaagacaaagccacgggaggagcagttcaacagcacgttccgtgtggtcagcgtcctcaccgttgtgcaccaggactggctgaacggcaaggagtacaagtgcaaggtctccaacaaaggcctcccagcccccatcgagaaaaccatctccaaaaccaaagggcagccccgagaaccacaggtgtacaccctgcccccatcccgggaggagatgaccaagaaccaggtcagcctgacctgcctggtcaaaggcttctaccccagcgacatcgccgtggagtgggagagcaatgggcagccggagaacaactacaagaccacacctcccatgctggactccgacggctccttcttcctctacagcaagctcaccgtggacaagagcaggtggcagcaggggaacgtcttctcatgctccgtgatgcatgaggctctgcacaaccactacacgcagaagagcctctccctgtctccgggtaaatagtaagtttaaactctaga

SEQ ID NO: 53 - protein, 477 aa, Artificial Sequence
  Humanized E6 IgG2 heavy chain synthesized by Genescript
  misc_feature (477)..(477): Xaa can be any naturally occurring amino acid
EFAWATMELGLRWVFLVAILEGVQCEVQLVESGGGLVKPGGSLRLSCAASGFTFSRYGMSWVRQAPGKRLEWVSTISGGGTYIYYPDSVKGRFTISRDNAKNTLYLQMNSLRAEDTAVYYCTRDNYGRNYDYGMDYWGQGTLVTVSSASTKGPSVFPLAPCSRSTSESTAALGCLVKDYFPEPVTVSWNSGALTSGVHTFPAVLQSSGLYSLSSVVTVPSSNFGTQTYTCNVDHKPSNTKVDKTVERKCCVECPPCPAPPVAGPSVFLFPPKPKDTLMISRTPEVTCVVVDVSHEDPEVQFNWYVDGVEVHNAKTKPREEQFNSTFRVVSVLTVVHQDWLNGKEYKCKVSNKGLPAPIEKTISKTKGQPREPQVYTLPPSREEMTKNQVSLTCLVKGFYPSDIAVEWESNGQPENNYKTTPPMLDSDGSFFLYSKLTVDKSRWQQGNVFSCSVMHEALHNHYTQKSLSLSPGKVTLX

SEQ ID NO: 54 - DNA, 981 bp, Artificial Sequence
  Human IgG2 heavy chain constant region sequence
gcctccaccaagggcccatcggtcttccccctggcgccctgctccaggagcacctccgagagcacagccgccctgggctgcctggtcaaggactacttccccgaaccggtgacggtgtcgtggaactcaggcgctctgaccagcggcgtgcacaccttcccagctgtcctacagtcctcaggactctactccctcagcagcgtggtgaccgtgccctccagcaacttcggcacccagacctacacctgcaacgtagatcacaagcccagcaacaccaaggtggacaagacagttgagcgcaaatgttgtgtcgagtgcccaccgtgcccagcaccacctgtggcaggaccgtcagtcttcctcttccccccaaaacccaaggacaccctcatgatctcccggacccctgaggtcacgtgcgtggtggtggacgtgagccacgaagaccccgaggtccagttcaactggtacgtggacggcgtggaggtgcataatgccaagacaaagccacgggaggagcagttcaacagcacgttccgtgtggtcagcgtcctcaccgttgtgcaccaggactggctgaacggcaaggagtacaagtgcaaggtctccaacaaaggcctcccagcccccatcgagaaaaccatctccaaaaccaaagggcagccccgagaaccacaggtgtacaccctgcccccatcccgggaggagatgaccaagaaccaggtcagcctgacctgcctggtcaaaggcttctaccccagcgacatcgccgtggagtgggagagcaatgggcagccggagaacaactacaagaccacacctcccatgctggactccgacggctccttcttcctctacagcaagctcaccgtggacaagagcaggtggcagcaggggaacgtcttctcatgctccgtgatgcatgaggctctgcacaaccactacacgcagaagagcctctccctgtctccgggtaaatag

SEQ ID NO: 55 - protein, 326 aa, Artificial Sequence
  Human IgG2 heavy chain constant region sequence
ASTKGPSVFPLAPCSRSTSESTAALGCLVKDYFPEPVTVSWNSGALTSGVHTFPAVLQSSGLYSLSSVVTVPSSNFGTQTYTCNVDHKPSNTKVDKTVERKCCVECPPCPAPPVAGPSVFLFPPKPKDTLMISRTPEVTCVVVDVSHEDPEVQFNWYVDGVEVHNAKTKPREEQFNSTFRVVSVLTVVHQDWLNGKEYKCKVSNKGLPAPIEKTISKTKGQPREPQVYTLPPSREEMTKNQVSLTCLVKGFYPSDIAVEWESNGQPENNYKTTPPMLDSDGSFFLYSKLTVDKSRWQQGNVFSCSVMHEALHNHYTQKSLSLSPGK

SEQ ID NO: 56 - DNA, 1362 bp, Artificial Sequence
  Humanized E6 IgG1 heavy chain sequence
gaggtgcagctggtggagtctgggggaggcctggtcaagcctggggggtccctgagactctcctgtgcagcctctggattcaccttcagtaggtatggcatgagctgggtccgccaggctccagggaagaggctggagtgggtctcaaccattagtggcggaggcacctacatatactacccagactcagtgaagggccgattcaccatctccagagacaacgccaagaacccactgtatctgcaaatgaacagcctgagagccgaggacacggctgtgtattactgtcccagagataactatggccgcaactatgattatggcatggattattggggccagggcaccctggtgaccgtgagcagcgctagcaccaagggcccatcggtcttccccctggcaccctcctccaagagcacctctgggggcacagcggccctgggctgcctggtcaaggactacttccccgaaccggtgacggtgtcgtggaactcaggcgccctgaccagcggcgtgcacaccttcccggctgtcctacagtcctcaggactctactccctcagcagcgtggtgacagtgccctccagcagcttgggcacccagacctacatctgcaacgtgaatcacaagcccagcaacaccaaggtggacaagaaagttgagcccaaatcttgtgacaaaactcacacatgcccaccgtgcccagcacctgaactcctggggggaccgtcagtcttcctcttccccccaaaacccaaggacaccctcatgatctcccggacccctgaggtcacatgcgtggtggtggacgtgagccacgaagaccctgaggtcaagttcaactggtacgtggacggcgtggaggtgcataatgccaagacaaagccgcgggaggagcagtacaacagcacgtaccgtgtggtcagcgtcctcaccgtcctgcaccaggactggctgaatggcaaggagtacaagtgcaaggtctccaacaaagccctcccagcccccatcgagaaaaccatctccaaagccaaagggcagccccgagaaccacaggtgtacaccctgcccccatcccgggaggagatgaccaagaaccaggtcagcctgacctgcctggtcaaaggcttctatcccagcgacatcgccgtggagtgggagagcaatgggcagccggagaacaactacaagaccacgcctcccgtgctggactccgacggctccttcttcctctacagcaagctcaccgtggacaagagcaggtggcagcaggggaacgtcttctcatgctccgtgatgcatgaggctctgcacaaccactacacgcagaagagcctctccctgtctccgggtaaatgataa

SEQ ID NO: 57 - protein, 452 aa, Artificial Sequence
  Humanized E6 IgG1 heavy chain sequence
EVQLVESGGGLVKPGGSLRLSCAASGFTFSRYGMSWVRQAPGKRLEWVSTISGGGTYIYYPDSVKGRFTISRDNAKNPLYLQMNSLRAEDTAVYYCPRDNYGRNYDYGMDYWGQGTLVTVSSASTKGPSVFPLAPSSKSTSGGTAALGCLVKDYFPEPVTVSWNSGALTSGVHTFPAVLQSSGLYSLSSVVTVPSSSLGTQTYICNVNHKPSNTKVDKKVEPKSCDKTHTCPPCPAPELLGGPSVFLFPPKPKDTLMISRTPEVTCVVVDVSHEDPEVKFNWYVDGVEVHNAKTKPREEQYNSTYRVVSVLTVLHQDWLNGKEYKCKVSNKALPAPIEKTISKAKGQPREPQVYTLPPSREEMTKNQVSLTCLVKGFYPSDIAVEWESNGQPENNYKTTPPVLDSDGSFFLYSKLTVDKSRWQQGNVFSCSVMHEALHNHYTQKSLSLSPGK

SEQ ID NO: 58 - DNA, 996 bp, Artificial Sequence
  Human IgG1 heavy chain constant region sequence
gctagcaccaagggcccatcggtcttccccctggcaccctcctccaagagcacctctgggggcacagcggccctgggctgcctggtcaaggactacttccccgaaccggtgacggtgtcgtggaactcaggcgccctgaccagcggcgtgcacaccttcccggctgtcctacagtcctcaggactctactccctcagcagcgtggtgacagtgccctccagcagcttgggcacccagacctacatctgcaacgtgaatcacaagcccagcaacaccaaggtggacaagaaagttgagcccaaatcttgtgacaaaactcacacatgcccaccgtgcccagcacctgaactcctggggggaccgtcagtcttcctcttccccccaaaacccaaggacaccctcatgatctcccggacccctgaggtcacatgcgtggtggtggacgtgagccacgaagaccctgaggtcaagttcaactggtacgtggacggcgtggaggtgcataatgccaagacaaagccgcgggaggagcagtacaacagcacgtaccgtgtggtcagcgtcctcaccgtcctgcaccaggactggctgaatggcaaggagtacaagtgcaaggtctccaacaaagccctcccagcccccatcgagaaaaccatctccaaagccaaagggcagccccgagaaccacaggtgtacaccctgcccccatcccgggaggagatgaccaagaaccaggtcagcctgacctgcctggtcaaaggcttctatcccagcgacatcgccgtggagtgggagagcaatgggcagccggagaacaactacaagaccacgcctcccgtgctggactccgacggctccttcttcctctacagcaagctcaccgtggacaagagcaggtggcagcaggggaacgtcttctcatgctccgtgatgcatgaggctctgcacaaccactacacgcagaagagcctctccctgtctccgggtaaatgataa

SEQ ID NO: 59 - protein, 330 aa, Artificial Sequence
  Human IgG1 heavy chain constant region sequence
ASTKGPSVFPLAPSSKSTSGGTAALGCLVKDYFPEPVTVSWNSGALTSGVHTFPAVLQSSGLYSLSSVVTVPSSSLGTQTYICNVNHKPSNTKVDKKVEPKSCDKTHTCPPCPAPELLGGPSVFLFPPKPKDTLMISRTPEVTCVVVDVSHEDPEVKFNWYVDGVEVHNAKTKPREEQYNSTYRVVSVLTVLHQDWLNGKEYKCKVSNKALPAPIEKTISKAKGQPREPQVYTLPPSREEMTKNQVSLTCLVKGFYPSDIAVEWESNGQPENNYKTTPPVLDSDGSFFLYSKLTVDKSRWQQGNVFSCSVMHEALHNHYTQKSLSLSPGK

SEQ ID NO: 60-64 - skipped (5 entries)

SEQ ID NO: 65 - DNA, 318 bp, Artificial Sequence
  Mouse E6 Light Chain variable region sequence
caaattgttctcacccagtctccagcaatcatgtctgcatctccaggggaggaggtcaccctaacctgcagtgccacctcaagtgtaagttacatacactggttccagcagaggccaggcacttctcccaaactctggatttatagcacatccaacctggcttctggagtccctgttcgcttcagtggcagtggatatgggacctcttactctctcacaatcagccgaatggaggctgaagatgctgccacttattactgccagcaaaggagtagttccccattcacgttcggctcggggacaaagttggaaataaaa

SEQ ID NO: 66 - protein, 106 aa, Artificial Sequence
  Mouse E6 Light Chain variable region sequence
QIVLTQSPAIMSASPGEEVTLTCSATSSVSYIHWFQQRPGTSPKLWIYSTSNLASGVPVRFSGSGYGTSYSLTISRMEAEDAATYYCQQRSSSPFTFGSGTKLEIK

SEQ ID NO: 67 - DNA, 69 bp, Artificial Sequence
  Mouse E6 light chain variable framework region 1 (FWR1) sequence
caaattgttctcacccagtctccagcaatcatgtctgcatctccaggggaggaggtcaccctaacctgc

SEQ ID NO: 68 - protein, 23 aa, Artificial Sequence
  Mouse E6 light chain variable framework region 1 (FWR1) sequence
QIVLTQSPAIMSASPGEEVTLTC

SEQ ID NO: 69 - DNA, 30 bp, Artificial Sequence
  Mouse E6 light chain variable complementarity determining regions 1 (CDR1) sequence
agtgccacctcaagtgtaagttacatacac

SEQ ID NO: 70 - protein, 10 aa, Artificial Sequence
  Mouse E6 light chain variable complementarity determining regions 1 (CDR1) sequence
SATSSVSYIH

SEQ ID NO: 71 - DNA, 45 bp, Artificial Sequence
  Mouse E6 light chain variable framework region 2 (FWR2) sequence
tggttccagcagaggccaggcacttctcccaaactctggatttat

SEQ ID NO: 72 - protein, 15 aa, Artificial Sequence
  Mouse E6 light chain variable framework region 2 (FWR2) sequence
WFQQRPGTSPKLWIY

SEQ ID NO: 73 - DNA, 21 bp, Artificial Sequence
  Mouse E6 light chain variable complementarity determining regions 2 (CDR2) sequence
agcacatccaacctggcttct

SEQ ID NO: 74 - protein, 7 aa, Artificial Sequence
  Mouse E6 light chain variable complementarity determining regions 2 (CDR2) sequence
STSNLAS

SEQ ID NO: 75 - DNA, 96 bp, Artificial Sequence
  Mouse E6 light chain variable framework region 3 (FWR3) sequence
ggagtccctgttcgcttcagtggcagtggatatgggacctcttactctctcacaatcagccgaatggaggctgaagatgctgccacttattactgc

SEQ ID NO: 76 - protein, 32 aa, Artificial Sequence
  Mouse E6 light chain variable framework region 3 (FWR3) sequence
GVPVRFSGSGYGTSYSLTISRMEAEDAATYYC

SEQ ID NO: 77 - DNA, 27 bp, Artificial Sequence
  Mouse E6 light chain variable complementarity determining regions 3 (CDR3) sequence
cagcaaaggagtagttccccattcacg

SEQ ID NO: 78 - protein, 9 aa, Artificial Sequence
  Mouse E6 light chain variable complementarity determining regions 3 (CDR3) sequence
QQRSSSPFT

SEQ ID NO: 79-92 - skipped (14 entries)

SEQ ID NO: 93 - DNA, 318 bp, Artificial Sequence
  Humanized E6 light chain variable region sequence from IGKV3-11*02
gaaattgtgttgacacagtctccagccaccctgtctttgtctccaggggaaagagccaccctcacctgcagcgccaccagcagtgttagctacatccactggtaccaacagaggcctggccagagccccaggctcctcatctatagcacctccaacctggccagcggcatcccagccaggttcagtggcagtgggtctgggagcgactacactctcaccatcagcagcctagagcctgaagattttgcagtttattactgtcagcagcgtagcagctcccctttcacctttggcagcggcaccaaagtggaaattaaa

SEQ ID NO: 94 - protein, 106 aa, Artificial Sequence
  Humanized E6 light chain variable region sequence from IGKV3-11*02
EIVLTQSPATLSLSPGERATLTCSATSSVSYIHWYQQRPGQSPRLLIYSTSNLASGIPARFSGSGSGSDYTLTISSLEPEDFAVYYCQQRSSSPFTFGSGTKVEIK

SEQ ID NO: 95 - DNA, 69 bp, Artificial Sequence
  Humanized E6 light chain variable framework region 1 (FWR1) acid sequence
gaaattgtgttgacacagtctccagccaccctgtctttgtctccaggggaaagagccaccctcacctgc

SEQ ID NO: 96 - protein, 23 aa, Artificial Sequence
  Humanized E6 light chain variable framework region 1 (FWR1) acid sequence
EIVLTQSPATLSLSPGERATLTC

SEQ ID NO: 97 - DNA, 30 bp, Artificial Sequence
  Humanized E6 light chain variable complementarity determining regions 1 (CDR1) sequence
agcgccaccagcagtgttagctacatccac

SEQ ID NO: 98 - protein, 10 aa, Artificial Sequence
  Humanized E6 light chain variable complementarity determining regions 1 (CDR1) sequence
SATSSVSYIH

SEQ ID NO: 99 - DNA, 45 bp, Artificial Sequence
  Humanized E6 heavy light variable framework region 2 (FWR2) acid sequence
tggtaccaacagaggcctggccagagccccaggctcctcatctat

SEQ ID NO: 100 - protein, 15 aa, Artificial Sequence
  Humanized E6 heavy light variable framework region 2 (FWR2) acid sequence
WYQQRPGQSPRLLIY

SEQ ID NO: 101 - DNA, 21 bp, Artificial Sequence
  Humanized E6 light chain variable complementarity determining regions 2 (CDR2) sequence
agcacctccaacctggccagc

SEQ ID NO: 102 - protein, 7 aa, Artificial Sequence
  Humanized E6 light chain variable complementarity determining regions 2 (CDR2) sequence
STSNLAS

SEQ ID NO: 103 - DNA, 96 bp, Artificial Sequence
  Humanized E6 light chain variable framework region 3 (FWR3) acid sequence
ggcatcccagccaggttcagtggcagtgggtctgggagcgactacactctcaccatcagcagcctagagcctgaagattttgcagtttattactgt

SEQ ID NO: 104 - protein, 32 aa, Artificial Sequence
  Humanized E6 light chain variable framework region 3 (FWR3) acid sequence
GIPARFSGSGSGSDYTLTISSLEPEDFAVYYC

SEQ ID NO: 105 - DNA, 27 bp, Artificial Sequence
  Humanized E6 light chain variable complementarity determining regions 3 (CDR3) sequence
cagcagcgtagcagctcccctttcacc

SEQ ID NO: 106 - protein, 9 aa, Artificial Sequence
  Humanized E6 light chain variable complementarity determining regions 3 (CDR3) sequence
QQRSSSPFT

SEQ ID NO: 107 - DNA, 740 bp, Artificial Sequence
  Humanized E6 Kappa light chain synthesized by Genescript
gaattctaagcttgggccaccatggaagccccagcgcagcttctcttcctcctgctactctggctcccagataccactggagaaattgtgttgacacagtctccagccaccctgtctttgtctccaggggaaagagccaccctcacctgcagcgccaccagcagtgttagctacatccactggtaccaacagaggcctggccagagccccaggctcctcatctatagcacctccaacctggccagcggcatcccagccaggttcagtggcagtgggtctgggagcgactacactctcaccatcagcagcctagagcctgaagattttgcagtttattactgtcagcagcgtagcagctcccctttcacctttggcagcggcaccaaagtggaaattaaaaggacggtggctgcaccatctgtcttcatcttcccgccatctgatgagcagttgaaatctggaactgcctctgttgtgtgcctgctgaataacttctatcccagagaggccaaagtacagtggaaggtggataacgccctccaatcgggtaactcccaggagagtgtcacagagcaggacagcaaggacagcacctacagcctcagcagcaccctgacgctgagcaaagcagactacgagaaacacaaagtctacgcctgcgaagtcacccatcagggcctgagctcgcccgtcacaaagagcttcaacaggggagagtgttagtaagtttaaactctaga

SEQ ID NO: 108 - protein, 243 aa, Artificial Sequence
  Humanized E6 Kappa light chain synthesized by Genescript
  misc_feature (243)..(243): Xaa can be any naturally occurring amino acid
EFAWATMEAPAQLLFLLLLWLPDTTGEIVLTQSPATLSLSPGERATLTCSATSSVSYIHWYQQRPGQSPRLLIYSTSNLASGIPARFSGSGSGSDYTLTISSLEPEDFAVYYCQQRSSSPFTFGSGTKVEIKRTVAAPSVFIFPPSDEQLKSGTASVVCLLNNFYPREAKVQWKVDNALQSGNSQESVTEQDSKDSTYSLSSTLTLSKADYEKHKVYACEVTHQGLSSPVTKSFNRGECVTLX

SEQ ID NO: 109 - DNA, 324 bp, Artificial Sequence
  Human Kappa light chain constant region sequence
aggacggtggctgcaccatctgtcttcatcttcccgccatctgatgagcagttgaaatctggaactgcctctgttgtgtgcctgctgaataacttctatcccagagaggccaaagtacagtggaaggtggataacgccctccaatcgggtaactcccaggagagtgtcacagagcaggacagcaaggacagcacctacagcctcagcagcaccctgacgctgagcaaagcagactacgagaaacacaaagtctacgcctgcgaagtcacccatcagggcctgagctcgcccgtcacaaagagcttcaacaggggagagtgttag

SEQ ID NO: 110 - protein, 107 aa, Artificial Sequence [sequence omitted]

SEQ ID NO: 111 - DNA, 642 bp, Artificial Sequence
  Humanized E6 lambda light chain sequence
gaaattgtgttgacacagtctccagccaccctgtctttgtctccaggggaaagagccaccctcacctgcagcgccaccagcagtgttagctacatccactggtaccaacagaggcctggccagagccccaggctcctcatctatagcacctccaacctggccagcggcatcccagccaggttcagtggcagtgggtctgggagcgactacactctcaccatcagcagcctagagcctgaagattttgcagtttattactgtcagcagcgtagcagctcccctttcacctttggcagcggcaccaaagtggaaattaaaggtcagcccaaggctgccccctcggtcactctgttcccgccctcctctgaggagcttcaagccaacaaggccacactggtgtgtctcataagtgacttctacccgggagccgtgacagtggcctggaaggcagatagcagccccgtcaaggcgggagtggagaccaccacaccctccaaacaaagcaacaacaagtacgcggccagcagctatctgagcctgacgcctgagcagtggaagtcccacagaagctacagctgccaggtcacgcatgaagggagcaccgtggagaagacagtggcccctacagaatgttcatagtaa

SEQ ID NO: 112 - protein, 212 aa, Artificial Sequence
  Humanized E6 lambda light chain sequence
EIVLTQSPATLSLSPGERATLTCSATSSVSYIHWYQQRPGQSPRLLIYSTSNLASGIPARFSGSGSGSDYTLTISSLEPEDFAVYYCQQRSSSPFTFGSGTKVEIKGQPKAAPSVTLFPPSSEELQANKATLVCLISDFYPGAVTVAWKADSSPVKAGVETTTPSKQSNNKYAASSYLSLTPEQWKSHRSYSCQVTHEGSTVEKTVAPTECS

SEQ ID NO: 113 - DNA, 324 bp, Artificial Sequence
  Humanized lambda light chain constant region sequence
ggtcagcccaaggctgccccctcggtcactctgttcccgccctcctctgaggagcttcaagccaacaaggccacactggtgtgtctcataagtgacttctacccgggagccgtgacagtggcctggaaggcagatagcagccccgtcaaggcgggagtggagaccaccacaccctccaaacaaagcaacaacaagtacgcggccagcagctatctgagcctgacgcctgagcagtggaagtcccacagaagctacagctgccaggtcacgcatgaagggagcaccgtggagaagacagtggcccctacagaatgttcatagtaa

SEQ ID NO: 114 - protein, 106 aa, Artificial Sequence
  Humanized lambda light chain constant region sequence
GQPKAAPSVTLFPPSSEELQANKATLVCLISDFYPGAVTVAWKADSSPVKAGVETTTPSKQSNNKYAASSYLSLTPEQWKSHRSYSCQVTHEGSTVEKTVAPTECS

SEQ ID NO: 115-117 - skipped (3 entries)

SEQ ID NO: 118 - DNA, 390 bp, Artificial Sequence
  Mouse C2 heavy chain variable region sequence
gaggtccagctggaggagtcagggggaggcttagtgaagcctggagggtccctgaaactctcctgtgcagcctctggattcactttcagtggctatgccatgtcttgggttcgccagactccggagaagaggctggagtgggtcgcaaccattagtagtggtggtacttatatctactatccagacagtgtgaaggggcgattcaccatctccagagacaatgccaagaacaccctgtacctgcaaatgagcagtctgaggtctgaggacacggccatgtattactgtgcaagacttgggggggataattactacgaatacttcgatgtctggggcgcagggaccacggtcaccgtctcctccgccaaaacgacacccccatctgtctat

SEQ ID NO: 119 - protein, 130 aa, Artificial Sequence
  Mouse C2 heavy chain variable region sequence
EVQLEESGGGLVKPGGSLKLSCAASGFTFSGYAMSWVRQTPEKRLEWVATISSGGTYIYYPDSVKGRFTISRDNAKNTLYLQMSSLRSEDTAMYYCARLGGDNYYEYFDVWGAGTTVTVSSAKTTPPSVY

SEQ ID NO: 120 - DNA, 90 bp, Artificial Sequence
  Mouse C2 heavy chain variable framework region 1 (FWR1) sequence
gaggtccagctggaggagtcagggggaggcttagtgaagcctggagggtccctgaaactctcctgtgcagcctctggattcactttcagt

SEQ ID NO: 121 - protein, 30 aa, Artificial Sequence
  Mouse C2 heavy chain variable framework region 1 (FWR1) sequence
EVQLEESGGGLVKPGGSLKLSCAASGFTFS

SEQ ID NO: 122 - DNA, 15 bp, Artificial Sequence
  Mouse C2 heavy chain variable complementarity determining regions 1 (CDR1) sequence
ggctatgccatgtct

SEQ ID NO: 123 - protein, 5 aa, Artificial Sequence
  Mouse C2 heavy chain variable complementarity determining regions 1 (CDR1) sequence
GYAMS

SEQ ID NO: 124 - DNA, 42 bp, Artificial Sequence
  Mouse C2 heavy chain variable framework region 2 (FWR2) sequence
tgggttcgccagactccggagaagaggctggagtgggtcgca

SEQ ID NO: 125 - protein, 14 aa, Artificial Sequence
  Mouse C2 heavy chain variable framework region 2 (FWR2) sequence
WVRQTPEKRLEWVA

SEQ ID NO: 126 - DNA, 51 bp, Artificial Sequence
  Mouse C2 heavy chain variable complementarity determining regions 2 (CDR2) sequence
accattagtagtggtggtacttatatctactatccagacagtgtgaagggg

SEQ ID NO: 127 - protein, 17 aa, Artificial Sequence
  Mouse C2 heavy chain variable complementarity determining regions 2 (CDR2) sequence
TISSGGTYIYYPDSVKG

SEQ ID NO: 128 - DNA, 96 bp, Artificial Sequence
  Mouse C2 heavy chain variable framework region 3 (FWR3) sequence
cgattcaccatctccagagacaatgccaagaacaccctgtacctgcaaatgagcagtctgaggtctgaggacacggccatgtattactgtgcaaga

SEQ ID NO: 129 - protein, 32 aa, Artificial Sequence
  Mouse C2 heavy chain variable framework region 3 (FWR3) sequence
RFTISRDNAKNTLYLQMSSLRSEDTAMYYCAR

SEQ ID NO: 130 - DNA, 36 bp, Artificial Sequence
  Mouse C2 heavy chain variable complementarity determining regions 3 (CDR3) sequence
cttgggggggataattactacgaatacttcgatgtc

SEQ ID NO: 131 - protein, 12 aa, Artificial Sequence
  Mouse C2 heavy chain variable complementarity determining regions 3 (CDR3) sequence
LGGDNYYEYFDV

SEQ ID NO: 132-143 - skipped (12 entries)

SEQ ID NO: 144 - DNA, 363 bp, Artificial Sequence
  Humanized derived from IGHV3-21*04 - Humanized C2 heavy chain variable region sequence
gaggtgcagctggtggagtctgggggaggcctggtcaagcctggggggtccctgagactctcctgtgcagcctctggattcaccttcagtggctatgccatgagctgggtccgccaggctccagggaaggggctggagtgggtctcaaccattagtagtggcggaacctacatatactaccccgactcagtgaagggccgattcaccatctccagagacaacgccaagaactcactgtatctgcaaatgaacagcctgagagccgaggacacggccgtgtattactgtgcgagacttgggggggataattactacgaatacttcgatgtctggggcaaagggaccacggtcaccgtctcctcc

SEQ ID NO: 145 - protein, 121 aa, Artificial Sequence
  Humanized C2 heavy chain variable region sequence
EVQLVESGGGLVKPGGSLRLSCAASGFTFSGYAMSWVRQAPGKGLEWVSTISSGGTYIYYPDSVKGRFTISRDNAKNSLYLQMNSLRAEDTAVYYCARLGGDNYYEYFDVWGKGTTVTVSS

SEQ ID NO: 146 - DNA, 90 bp, Artificial Sequence; identical to SEQ ID NO: 40
  Humanized C2 heavy chain variable framework region 1 (FWR1) sequence

SEQ ID NO: 147 - protein, 30 aa, Artificial Sequence; identical to SEQ ID NO: 41
  Humanized C2 heavy chain variable framework region 1 (FWR1) sequence

SEQ ID NO: 148 - DNA, 15 bp, Artificial Sequence
  Humanized C2 heavy chain variable complementarity determining regions 1 (CDR1) sequence
ggctatgccatgagc

SEQ ID NO: 149 - protein, 5 aa, Artificial Sequence
  Humanized C2 heavy chain variable complementarity determining regions 1 (CDR1) sequence
GYAMS

SEQ ID NO: 150 - DNA, 43 bp, Artificial Sequence
  Humanized C2 heavy chain variable framework region 2 (FWR2) sequence
tgggtccgccaggctccagggaaggggctggagtgggtctcaa

SEQ ID NO: 151 - protein, 14 aa, Artificial Sequence
  Humanized C2 heavy chain variable framework region 2 (FWR2) sequence
WVRQAPGKGLEWVS

SEQ ID NO: 152 - DNA, 51 bp, Artificial Sequence
  Humanized C2 heavy chain variable complementarity determining regions 2 (CDR2) sequence
accattagtagtggcggaacctacatatactaccccgactcagtgaagggc

SEQ ID NO: 153 - protein, 17 aa, Artificial Sequence
  Humanized C2 heavy chain variable complementarity determining regions 2 (CDR2) sequence
TISSGGTYIYYPDSVKG

SEQ ID NO: 154 - DNA, 96 bp, Artificial Sequence
  Humanized C2 heavy chain variable framework region 3 (FWR3) sequence
cgattcaccatctccagagacaacgccaagaactcactgtatctgcaaatgaacagcctgagagccgaggacacggccgtgtattactgtgcgaga

SEQ ID NO: 155 - protein, 32 aa, Artificial Sequence
  Humanized C2 heavy chain variable framework region 3 (FWR3) sequence
RFTISRDNAKNSLYLQMNSLRAEDTAVYYCAR

SEQ ID NO: 156 - DNA, 36 bp, Artificial Sequence; identical to SEQ ID NO: 130
  Humanized C2 heavy chain variable complementarity determining regions 3 (CDR3) sequence

SEQ ID NO: 157 - protein, 12 aa, Artificial Sequence
  Humanized C2 heavy chain variable complementarity determining regions 3 (CDR3) sequence
LGGDNYYEYFDV

SEQ ID NO: 158 - protein, 451 aa, Artificial Sequence
  Humanized C2 IgG1 heavy chain sequence
EVQLVESGGGLVKPGGSLRLSCAASGFTFSGYAMSWVRQAPGKGLEWVSTISSGGTYIYYPDSVKGRFTISRDNAKNSLYLQMNSLRAEDTAVYYCARLGGDNYYEYFDVWGKGTTVTVSSASTKGPSVFPLAPSSKSTSGGTAALGCLVKDYFPEPVTVSWNSGALTSGVHTFPAVLQSSGLYSLSSVVTVPSSSLGTQTYICNVNHKPSNTKVDKKVEPKSCDKTHTCPPCPAPELLGGPSVFLFPPKPKDTLMISRTPEVTCVVVDVSHEDPEVKFNWYVDGVEVHNAKTKPREEQYNSTYRVVSVLTVLHQDWLNGKEYKCKVSNKALPAPIEKTISKAKGQPREPQVYTLPPSREEMTKNQVSLTCLVKGFYPSDIAVEWESNGQPENNYKTTPPVLDSDGSFFLYSKLTVDKSRWQQGNVFSCSVMHEALHNHYTQKSLSLSPGK

SEQ ID NO: 159-162 - skipped (4 entries)

SEQ ID NO: 163 - DNA, 1347 bp, Artificial Sequence
  Humanized C2 IgG2 heavy chain sequence
gaggtgcagctggtggagtctgggggaggcctggtcaagcctggggggtccctgagactctcctgtgcagcctctggattcaccttcagtggctatgccatgagctgggtccgccaggctccagggaaggggctggagtgggtctcaaccattagtagtggcggaacctacatatactaccccgactcagtgaagggccgattcaccatctccagagacaacgccaagaactcactgtatctgcaaatgaacagcctgagagccgaggacacggccgtgtattactgtgcgagacttgggggggataattactacgaatacttcgatgtctggggcaaagggaccacggtcaccgtctcctccgcctccaccaagggcccatcggtcttccccctggcgccctgctccaggagcacctccgagagcacagccgccctgggctgcctggtcaaggactacttccccgaaccggtgacggtgtcgtggaactcaggcgctctgaccagcggcgtgcacaccttcccagctgtcctacagtcctcaggactctactccctcagcagcgtggtgaccgtgccctccagcaacttcggcacccagacctacacctgcaacgtagatcacaagcccagcaacaccaaggtggacaagacagttgagcgcaaatgttgtgtcgagtgcccaccgtgcccagcaccacctgtggcaggaccgtcagtcttcctcttccccccaaaacccaaggacaccctcatgatctcccggacccctgaggtcacgtgcgtggtggtggacgtgagccacgaagaccccgaggtccagttcaactggtacgtggacggcgtggaggtgcataatgccaagacaaagccacgggaggagcagttcaacagcacgttccgtgtggtcagcgtcctcaccgttgtgcaccaggactggctgaacggcaaggagtacaagtgcaaggtctccaacaaaggcctcccagcccccatcgagaaaaccatctccaaaaccaaagggcagccccgagaaccacaggtgtacaccctgcccccatcccgggaggagatgaccaagaaccaggtcagcctgacctgcctggtcaaaggcttctaccccagcgacatcgccgtggagtgggagagcaatgggcagccggagaacaactacaagaccacacctcccatgctggactccgacggctccttcttcctctacagcaagctcaccgtggacaagagcaggtggcagcaggggaacgtcttctcatgctccgtgatgcatgaggctctgcacaaccactacacgcagaagagcctctccctgtctccgggtaaatagtaa

SEQ ID NO: 164 - protein, 447 aa, Artificial Sequence
  Humanized C2 IgG2 heavy chain sequence
EVQLVESGGGLVKPGGSLRLSCAASGFTFSGYAMSWVRQAPGKGLEWVSTISSGGTYIYYPDSVKGRFTISRDNAKNSLYLQMNSLRAEDTAVYYCARLGGDNYYEYFDVWGKGTTVTVSSASTKGPSVFPLAPCSRSTSESTAALGCLVKDYFPEPVTVSWNSGALTSGVHTFPAVLQSSGLYSLSSVVTVPSSNFGTQTYTCNVDHKPSNTKVDKTVERKCCVECPPCPAPPVAGPSVFLFPPKPKDTLMISRTPEVTCVVVDVSHEDPEVQFNWYVDGVEVHNAKTKPREEQFNSTFRVVSVLTVVHQDWLNGKEYKCKVSNKGLPAPIEKTISKTKGQPREPQVYTLPPSREEMTKNQVSLTCLVKGFYPSDIAVEWESNGQPENNYKTTPPMLDSDGSFFLYSKLTVDKSRWQQGNVFSCSVMHEALHNHYTQKSLSLSPGK

SEQ ID NO: 165-167 - skipped (3 entries)

SEQ ID NO: 168 - DNA, 360 bp, Artificial Sequence
  Mouse C2 light chain variable region sequence
gacattgtgatcacacagtctacagcttccttaggtgtatctctggggcagagggccaccatctcatgcagggccagcaaaagtgtcagtacatctggctatagttatatgcactggtaccaacagagaccaggacagccacccaaactcctcatctatcttgcatccaacctagaatctggggtccctgccaggttcagtggcagtgggtctgggacagacttcaccctcaacatccatcctgtggaggaggaggatgctgcaacctattactgtcagcacagtagggagcttccgttcacgttcggaggggggaccaagctggagataaaacgggctgatgctgcaccaactgtatcc

SEQ ID NO: 169 - protein, 120 aa, Artificial Sequence
  Mouse C2 light chain variable region sequence
DIVITQSTASLGVSLGQRATISCRASKSVSTSGYSYMHWYQQRPGQPPKLLIYLASNLESGVPARFSGSGSGTDFTLNIHPVEEEDAATYYCQHSRELPFTFGGGTKLEIKRADAAPTVS

SEQ ID NO: 170 - DNA, 69 bp, Artificial Sequence
  Mouse C2 light chain variable framework region 1 (FWR1) sequence
gacattgtgatcacacagtctacagcttccttaggtgtatctctggggcagagggccaccatctcatgc

SEQ ID NO: 171 - protein, 23 aa, Artificial Sequence
  Mouse C2 light chain variable framework region 1 (FWR1) sequence
DIVITQSTASLGVSLGQRATISC

SEQ ID NO: 172 - DNA, 45 bp, Artificial Sequence
  Mouse C2 light chain variable complementarity determining regions 1 (CDR1) sequence
agggccagcaaaagtgtcagtacatctggctatagttatatgcac

SEQ ID NO: 173 - protein, 15 aa, Artificial Sequence
  Mouse C2 light chain variable complementarity determining regions 1 (CDR1) sequence
RASKSVSTSGYSYMH

SEQ ID NO: 174 - DNA, 45 bp, Artificial Sequence
  Mouse C2 light chain variable framework region 2 (FWR2) sequence
tggtaccaacagagaccaggacagccacccaaactcctcatctat

SEQ ID NO: 175 - protein, 15 aa, Artificial Sequence
  Mouse C2 light chain variable framework region 2 (FWR2) sequence
WYQQRPGQPPKLLIY

SEQ ID NO: 176 - DNA, 20 bp, Artificial Sequence
  Mouse C2 light chain variable complementarity determining regions 2 (CDR2) sequence
cttgcatccaacctagaatc

SEQ ID NO: 177 - protein, 7 aa, Artificial Sequence
  Mouse C2 light chain variable complementarity determining regions 2 (CDR2) sequence
LASNLES

SEQ ID NO: 178 - DNA, 97 bp, Artificial Sequence
  Mouse C2 light chain variable framework region 3 (FWR3) sequence
tggggtccctgccaggttcagtggcagtgggtctgggacagacttcaccctcaacatccatcctgtggaggaggaggatgctgcaacctattactgt

SEQ ID NO: 179 - protein, 32 aa, Artificial Sequence
  Mouse C2 light chain variable framework region 3 (FWR3) sequence
GVPARFSGSGSGTDFTLNIHPVEEEDAATYYC

SEQ ID NO: 180 - DNA, 27 bp, Artificial Sequence
  Mouse C2 light chain variable complementarity determining regions 3 (CDR3) sequence
cagcacagtagggagcttccgttcacg

SEQ ID NO: 181 - protein, 9 aa, Artificial Sequence
  Mouse C2 light chain variable complementarity determining regions 3 (CDR3) sequence
QHSRELPFT

SEQ ID NO: 182-193 - skipped (12 entries)

SEQ ID NO: 194 - DNA, 339 bp, Artificial Sequence
  Humanized derived from IGKV73*01 - Humanized C2 light chain variable region sequence
gacattgtgctgacccagtctccagcctccttggccgtgtctccaggacagagggccaccatcacctgcagagccagtaagagtgtcagtaccagcggatactcctacatgcactggtatcagcagaaaccaggacaacctcctaaactcctgatttacctggcatccaatctggagagcggggtcccagccaggttcagcggcagtgggtctgggaccgatttcaccctcacaattaatcctgtggaagctaatgatactgcaaattattactgtcagcacagtagggagctgcctttcacattcggcggagggaccaaggtggagatcaaacgaact

SEQ ID NO: 195 - protein, 113 aa, Artificial Sequence
  Humanized derived from IGKV73*01 - Humanized C2 light chain variable region sequence
DIVLTQSPASLAVSPGQRATITCRASKSVSTSGYSYMHWYQQKPGQPPKLLIYLASNLESGVPARFSGSGSGTDFTLTINPVEANDTANYYCQHSRELPFTFGGGTKVEIKRT

SEQ ID NO: 196 - DNA, 69 bp, Artificial Sequence
  Humanized C2 light chain variable framework region 1 (FWR1) acid sequence
gacattgtgctgacccagtctccagcctccttggccgtgtctccaggacagagggccaccatcacctgc

SEQ ID NO: 197 - protein, 23 aa, Artificial Sequence
  Humanized C2 light chain variable framework region 1 (FWR1) acid sequence
DIVLTQSPASLAVSPGQRATITC

SEQ ID NO: 198 - DNA, 45 bp, Artificial Sequence
  Humanized C2 light chain variable complementarity determining regions 1 (CDR1) sequence
agagccagtaagagtgtcagtaccagcggatactcctacatgcac

SEQ ID NO: 199 - protein, 15 aa, Artificial Sequence
  Humanized C2 light chain variable complementarity determining regions 1 (CDR1) sequence
RASKSVSTSGYSYMH

SEQ ID NO: 200 - DNA, 45 bp, Artificial Sequence
  Humanized C2 heavy light variable framework region 2 (FWR2) acid sequence
tggtatcagcagaaaccaggacaacctcctaaactcctgatttac

SEQ ID NO: 201 - protein, 15 aa, Artificial Sequence
  Humanized C2 heavy light variable framework region 2 (FWR2) acid sequence
WYQQKPGQPPKLLIY

SEQ ID NO: 202 - DNA, 21 bp, Artificial Sequence
  Humanized C2 light chain variable complementarity determining regions 2 (CDR2) sequence
ctggcatccaatctggagagc

SEQ ID NO: 203 - protein, 7 aa, Artificial Sequence
  Humanized C2 light chain variable complementarity determining regions 2 (CDR2) sequence
LASNLES

SEQ ID NO: 204 - DNA, 96 bp, Artificial Sequence
  Humanized C2 light chain variable framework region 3 (FWR3) acid sequence
ggggtcccagccaggttcagcggcagtgggtctgggaccgatttcaccctcacaattaatcctgtggaagctaatgatactgcaaattattactgt

SEQ ID NO: 205 - protein, 32 aa, Artificial Sequence
  Humanized C2 light chain variable framework region 3 (FWR3) acid sequence
GVPARFSGSGSGTDFTLTINPVEANDTANYYC

SEQ ID NO: 206 - DNA, 27 bp, Artificial Sequence
  Humanized C2 light chain variable complementarity determining regions 3 (CDR3) sequence
cagcacagtagggagctgcctttcaca

SEQ ID NO: 207 - protein, 9 aa, Artificial Sequence
  Humanized C2 light chain variable complementarity determining regions 3 (CDR3) sequence
QHSRELPFT

SEQ ID NO: 208 - DNA, 27 bp, Artificial Sequence
  Humanized C2 light chain variable complementarity determining regions 3 (CDR3) sequence
ctgcagagtaagaattttcctcccaca

SEQ ID NO: 209 - protein, 9 aa, Artificial Sequence
  Humanized C2 light chain variable complementarity determining regions 3 (CDR3) sequence
LQSKNFPPT

SEQ ID NO: 210-221 - skipped (12 entries)

SEQ ID NO: 222 - DNA, 63 bp, Artificial Sequence
  Murine Ig kappa chain leader sequence
atggagacagacacactcctgctatgggtactgctgctctgggttccaggttccactggtgac

SEQ ID NO: 223 - protein, 21 aa, Artificial Sequence
  Murine Ig kappa chain leader sequence
METDTLLLWVLLLWVPGSTGD

SEQ ID NO: 224 - DNA, 60 bp, Artificial Sequence
  Interleukin2 (IL2) leader sequence
atgtacaggatgcaactcctgtcttgcattgcactaagtcttgcacttgtcacaaacagt

SEQ ID NO: 225 - protein, 20 aa, Artificial Sequence
  Interleukin2 (IL2) leader sequence
MYRMQLLSCIALSLALVTNS

SEQ ID NO: 226 - DNA, 48 bp, Artificial Sequence
  CD33 leader sequence
atgcctcttctgcttctgcttcctctgctttgggctggagctcttgct

SEQ ID NO: 227 - protein, 16 aa, Artificial Sequence
  CD33 leader sequence
MPLLLLLPLLWAGALA

SEQ ID NO: 228 - DNA, 57 bp, Artificial Sequence
  IGHV321*03 leader sequence
atggaactggggctccgctgggttttccttgttgctattttagaaggtgtccagtgt

SEQ ID NO: 229 - protein, 19 aa, Artificial Sequence
  IGHV321*03 leader sequence
MELGLRWVFLVAILEGVQC

SEQ ID NO: 230 - DNA, 60 bp, Artificial Sequence
  IGHV311*02 leader sequence
atggaagccccagcgcagcttctcttcctcctgctactctggctcccagataccactgga

SEQ ID NO: 231 - protein, 20 aa, Artificial Sequence
  IGHV311*02 leader sequence
MEAPAQLLFLLLLWLPDTTG

SEQ ID NO: 232 - DNA, 729 bp, Artificial Sequence
  Humanized E6 single chain GS3
gaggtgcagctggtggagtctgggggaggcctggtcaagcctggggggtccctgagactctcctgtgcagcctctggattcaccttcagtaggtatggcatgagctgggtccgccaggctccagggaagaggctggagtgggtctcaaccattagtggcggaggcacctacatatactacccagactcagtgaagggccgattcaccatctccagagacaacgccaagaacaccctgtatctgcaaatgaacagcctgagagccgaggacacggctgtgtattactgtaccagagataactatggccgcaactatgattatggcatggattattggggccagggcaccctggtgaccgtgagcagcggcggtggcggatccggcggtggcggatccggcggtggcggatccgaaattgtgttgacacagtctccagccaccctgtctttgtctccaggggaaagagccaccctcacctgcagcgccaccagcagtgttagctacatccactggtaccaacagaggcctggccagagccccaggctcctcatctatagcacctccaacctggccagcggcatcccagccaggttcagtggcagtgggtctgggagcgactacactctcaccatcagcagcctagagcctgaagattttgcagtttattactgtcagcagcgtagcagctcccctttcacctttggcagcggcaccaaagtggaaattaaa

SEQ ID NO: 233 - protein, 243 aa, Artificial Sequence
  Humanized E6 single chain GS3
EVQLVESGGGLVKPGGSLRLSCAASGFTFSRYGMSWVRQAPGKRLEWVSTISGGGTYIYYPDSVKGRFTISRDNAKNTLYLQMNSLRAEDTAVYYCTRDNYGRNYDYGMDYWGQGTLVTVSSGGGGSGGGGSGGGGSEIVLTQSPATLSLSPGERATLTCSATSSVSYIHWYQQRPGQSPRLLIYSTSNLASGIPARFSGSGSGSDYTLTISSLEPEDFAVYYCQQRSSSPFTFGSGTKVEIK

SEQ ID NO: 234 - DNA, 747 bp, Artificial Sequence
  Humanized E6 single chain IgG1noC
gaggtgcagctggtggagtctgggggaggcctggtcaagcctggggggtccctgagactctcctgtgcagcctctggattcaccttcagtaggtatggcatgagctgggtccgccaggctccagggaagaggctggagtgggtctcaaccattagtggcggaggcacctacatatactacccagactcagtgaagggccgattcaccatctccagagacaacgccaagaacaccctgtatctgcaaatgaacagcctgagagccgaggacacggctgtgtattactgtaccagagataactatggccgcaactatgattatggcatggattattggggccagggcaccctggtgaccgtgagcagcgataaaacccatactaaaccgccaaaaccggcgccggaactgctgggtggtcctggtaccggtgaaattgtgttgacacagtctccagccaccctgtctttgtctccaggggaaagagccaccctcacctgcagcgccaccagcagtgttagctacatccactggtaccaacagaggcctggccagagccccaggctcctcatctatagcacctccaacctggccagcggcatcccagccaggttcagtggcagtgggtctgggagcgactacactctcaccatcagcagcctagagcctgaagattttgcagtttattactgtcagcagcgtagcagctcccctttcacctttggcagcggcaccaaagtggaaattaaa

SEQ ID NO: 235 - protein, 249 aa, Artificial Sequence
  Humanized E6 single chain IgG1noC
EVQLVESGGGLVKPGGSLRLSCAASGFTFSRYGMSWVRQAPGKRLEWVSTISGGGTYIYYPDSVKGRFTISRDNAKNTLYLQMNSLRAEDTAVYYCTRDNYGRNYDYGMDYWGQGTLVTVSSDKTHTKPPKPAPELLGGPGTGEIVLTQSPATLSLSPGERATLTCSATSSVSYIHWYQQRPGQSPRLLIYSTSNLASGIPARFSGSGSGSDYTLTISSLEPEDFAVYYCQQRSSSPFTFGSGTKVEIK

SEQ ID NO: 236 - DNA, 813 bp, Artificial Sequence
  Humanized E6 single chain X4 (linker is IgG1 and IgG2 modified hinge region
gaggtgcagctggtggagtctgggggaggcctggtcaagcctggggggtccctgagactctcctgtgcagcctctggattcaccttcagtaggtatggcatgagctgggtccgccaggctccagggaagaggctggagtgggtctcaaccattagtggcggaggcacctacatatactacccagactcagtgaagggccgattcaccatctccagagacaacgccaagaacaccctgtatctgcaaatgaacagcctgagagccgaggacacggctgtgtattactgtaccagagataactatggccgcaactatgattatggcatggattattggggccagggcaccctggtgaccgtgagcagcgataaaacccatactaaaccgccaaaaccggcgccggaactgctgggtggtcctggtaccggtactggtggtccgactattaaacctccgaaacctccgaaacctgctccgaacctgctgggtggtccggaaattgtgttgacacagtctccagccaccctgtctttgtctccaggggaaagagccaccctcacctgcagcgccaccagcagtgttagctacatccactggtaccaacagaggcctggccagagccccaggctcctcatctatagcacctccaacctggccagcggcatcccagccaggttcagtggcagtgggtctgggagcgactacactctcaccatcagcagcctagagcctgaagattttgcagtttattactgtcagcagcgtagcagctcccctttcacctttggcagcggcaccaaagtggaaattaaa

SEQ ID NO: 237 - protein, 271 aa, Artificial Sequence
  Humanized E6 single chain X4 (linker is IgG1 and IgG2 modified hinge region
EVQLVESGGGLVKPGGSLRLSCAASGFTFSRYGMSWVRQAPGKRLEWVSTISGGGTYIYYPDSVKGRFTISRDNAKNTLYLQMNSLRAEDTAVYYCTRDNYGRNYDYGMDYWGQGTLVTVSSDKTHTKPPKPAPELLGGPGTGTGGPTIKPPKPPKPAPNLLGGPEIVLTQSPATLSLSPGERATLTCSATSSVSYIHWYQQRPGQSPRLLIYSTSNLASGIPARFSGSGSGSDYTLTISSLEPEDFAVYYCQQRSSSPFTFGSGTKVEIK

SEQ ID NO: 238 - DNA, 747 bp, Artificial Sequence
  Humanized C2 single chain GS3
gaggtgcagctggtggagtctgggggaggcctggtcaagcctggggggtccctgagactctcctgtgcagcctctggattcaccttcagtggctatgccatgagctgggtccgccaggctccagggaaggggctggagtgggtctcaaccattagtagtggcggaacctacatatactaccccgactcagtgaagggccgattcaccatctccagagacaacgccaagaactcactgtatctgcaaatgaacagcctgagagccgaggacacggccgtgtattactgtgcgagacttgggggggataattactacgaatacttcgatgtctggggcaaagggaccacggtcaccgtctcctccggcggtggcggatccggcggtggcggatccggcggtggcggatccgacattgtgctgacccagtctccagcctccttggccgtgtctccaggacagagggccaccatcacctgcagagccagtaagagtgtcagtaccagcggatactcctacatgcactggtatcagcagaaaccaggacaacctcctaaactcctgatttacctggcatccaatctggagagcggggtcccagccaggttcagcggcagtgggtctgggaccgatttcaccctcacaattaatcctgtggaagctaatgatactgcaaattattactgtcagcacagtagggagctgcctttcacattcggcggagggaccaaggtggagatcaaacgaact

SEQ ID NO: 239 - protein, 249 aa, Artificial Sequence
  Humanized C2 single chain GS3
EVQLVESGGGLVKPGGSLRLSCAASGFTFSGYAMSWVRQAPGKGLEWVSTISSGGTYIYYPDSVKGRFTISRDNAKNSLYLQMNSLRAEDTAVYYCARLGGDNYYEYFDVWGKGTTVTVSSGGGGSGGGGSGGGGSDIVLTQSPASLAVSPGQRATITCRASKSVSTSGYSYMHWYQQKPGQPPKLLIYLASNLESGVPARFSGSGSGTDFTLTINPVEANDTANYYCQHSRELPFTFGGGTKVEIKRT

SEQ ID NO: 240-241 - skipped (2 entries)

SEQ ID NO: 242 - DNA, 831 bp, Artificial Sequence
  Humanized C2 single chain X4 (linker is IgG1 and IgG2 modified hinge region
gaggtgcagctggtggagtctgggggaggcctggtcaagcctggggggtccctgagactctcctgtgcagcctctggattcaccttcagtggctatgccatgagctgggtccgccaggctccagggaaggggctggagtgggtctcaaccattagtagtggcggaacctacatatactaccccgactcagtgaagggccgattcaccatctccagagacaacgccaagaactcactgtatctgcaaatgaacagcctgagagccgaggacacggccgtgtattactgtgcgagacttgggggggataattactacgaatacttcgatgtctggggcaaagggaccacggtcaccgtctcctccgataaaacccatactaaaccgccaaaaccggcgccggaactgctgggtggtcctggtaccggtactggtggtccgactattaaacctccgaaacctccgaaacctgctccgaacctgctgggtggtccggacattgtgctgacccagtctccagcctccttggccgtgtctccaggacagagggccaccatcacctgcagagccagtaagagtgtcagtaccagcggatactcctacatgcactggtatcagcagaaaccaggacaacctcctaaactcctgatttacctggcatccaatctggagagcggggtcccagccaggttcagcggcagtgggtctgggaccgatttcaccctcacaattaatcctgtggaagctaatgatactgcaaattattactgtcagcacagtagggagctgcctttcacattcggcggagggaccaaggtggagatcaaacgaact

SEQ ID NO: 243 - protein, 277 aa, Artificial Sequence
  Humanized C2 single chain X4 (linker is IgG1 and IgG2 modified hinge region
EVQLVESGGGLVKPGGSLRLSCAASGFTFSGYAMSWVRQAPGKGLEWVSTISSGGTYIYYPDSVKGRFTISRDNAKNSLYLQMNSLRAEDTAVYYCARLGGDNYYEYFDVWGKGTTVTVSSDKTHTKPPKPAPELLGGPGTGTGGPTIKPPKPPKPAPNLLGGPDIVLTQSPASLAVSPGQRATITCRASKSVSTSGYSYMHWYQQKPGQPPKLLIYLASNLESGVPARFSGSGSGTDFTLTINPVEANDTANYYCQHSRELPFTFGGGTKVEIKRT

SEQ ID NO: 244 - DNA, 744 bp, Artificial Sequence
  Humanized C3 single chain GS3
caggttcagctggtgcagtctggagctgaggtgaagaagcctggggcctcagtgaaggtctcctgcaaggcttctggttacacctttaccgactacgccatgaactgggtgcgacaggcccctggacaagggcttgagtggatgggagtgatcagcaccttcagcggtaacacaaacttcaaccagaagttcaagggcagagtcaccatgaccacagacacatccacgagcacagcctacatggagctgaggagcctgagatctgacgacacggccgtgtattactgtgcgagaagcgactactacggcccatacttcgactactggggccagggcaccaccctgaccgtgtccagcggcggtggcggatccggcggtggcggatccggcggtggcggatccgatattgtgatgacccagactccactctctctgtccgtcacccctggacagccggcctccatctcctgcaggtctagtcagaccattgtccatagtaatggaaacacctatttggagtggtacctgcagaagccaggccagtctccacagctcctgatctataaggtttccaaccggttctctggagtgccagataggttcagtggcagcgggtcagggacagatttcacactgaaaatcagccgggtggaggctgaggatgttggggtttattactgcttccaaggtagccacgtgcctttcaccttcggcggagggaccaaggtggagatcaaacgaact

SEQ ID NO: 245 - protein, 248 aa, Artificial Sequence
  Humanized C3 single chain GS3
QVQLVQSGAEVKKPGASVKVSCKASGYTFTDYAMNWVRQAPGQGLEWMGVISTFSGNTNFNQKFKGRVTMTTDTSTSTAYMELRSLRSDDTAVYYCARSDYYGPYFDYWGQGTTLTVSSGGGGSGGGGSGGGGSDIVMTQTPLSLSVTPGQPASISCRSSQTIVHSNGNTYLEWYLQKPGQSPQLLIYKVSNRFSGVPDRFSGSGSGTDFTLKISRVEAEDVGVYYCFQGSHVPFTFGGGTKVEIKRT

SEQ ID NO: 246-247 - skipped (2 entries)

SEQ ID NO: 248 - DNA, 828 bp, Artificial Sequence
  Humanized C3 single chain X4 (linker is IgG1 and IgG2 modified hinge region
caggttcagctggtgcagtctggagctgaggtgaagaagcctggggcctcagtgaaggtctcctgcaaggcttctggttacacctttaccgactacgccatgaactgggtgcgacaggcccctggacaagggcttgagtggatgggagtgatcagcaccttcagcggtaacacaaacttcaaccagaagttcaagggcagagtcaccatgaccacagacacatccacgagcacagcctacatggagctgaggagcctgagatctgacgacacggccgtgtattactgtgcgagaagcgactactacggcccatacttcgactactggggccagggcaccaccctgaccgtgtccagcgataaaacccatactaaaccgccaaaaccggcgccggaactgctgggtggtcctggtaccggtactggtggtccgactattaaacctccgaaacctccgaaacctgctccgaacctgctgggtggtccggatattgtgatgacccagactccactctctctgtccgtcacccctggacagccggcctccatctcctgcaggtctagtcagaccattgtccatagtaatggaaacacctatttggagtggtacctgcagaagccaggccagtctccacagctcctgatctataaggtttccaaccggttctctggagtgccagataggttcagtggcagcgggtcagggacagatttcacactgaaaatcagccgggtggaggctgaggatgttggggtttattactgcttccaaggtagccacgtgcctttcaccttcggcggagggaccaaggtggagatcaaacgaact

SEQ ID NO: 249 - protein, 276 aa, Artificial Sequence
  Humanized C3 single chain X4 (linker is IgG1 and IgG2 modified hinge region
QVQLVQSGAEVKKPGASVKVSCKASGYTFTDYAMNWVRQAPGQGLEWMGVISTFSGNTNFNQKFKGRVTMTTDTSTSTAYMELRSLRSDDTAVYYCARSDYYGPYFDYWGQGTTLTVSSDKTHTKPPKPAPELLGGPGTGTGGPTIKPPKPPKPAPNLLGGPDIVMTQTPLSLSVTPGQPASISCRSSQTIVHSNGNTYLEWYLQKPGQSPQLLIYKVSNRFSGVPDRFSGSGSGTDFTLKISRVEAEDVGVYYCFQGSHVPFTFGGGTKVEIKRT

SEQ ID NO: 250 - DNA, 741 bp, Artificial Sequence
  Humanized C8 single chain GS3 (linker is [Gly4Ser1]3
gaggtgcagctggtggagtctgggggaggcctggtcaagcctggggggtccctgagactctcctgtgcagcctctggattcaccttcagtggctatgccatgagctgggtccgccaggctccagggaaggggctggagtgggtctcaaccattagtagtggcggaacctacatatactaccctgactcagtgaagggccgattcaccatctccagagacaacgccaagaactcactgtatctgcaaatgaacagcctgagagccgaggacacggccgtgtattactgtgcgagactgggcggcgataactattatgaatattggggcaaagggaccacggtcaccgtctcctccggcggtggcggatccggcggtggcggatccggcggtggcggatccgacatcgtgatgacccagtctccagactccctggctgtgtctctgggcgagagggccaccatcaactgcagggccagcaagagtgttagcaccagcggctacagctacatgcactggtaccagcagaaaccaggacagcctcctaagctgctcatttacctggtgtctaacctggaatccggggtccctgaccgattcagtggcagcgggtctgggacagatttcactctcaccatcagcagcctgcaggctgaagatgtggcagtttattactgtcaacacattcgggaactgaccaggagtgaattcggcggagggaccaaggtggagatcaaacgaact

SEQ ID NO: 251 - protein, 247 aa, Artificial Sequence
  Humanized C8 single chain GS3 (linker is [Gly4Ser1]3
EVQLVESGGGLVKPGGSLRLSCAASGFTFSGYAMSWVRQAPGKGLEWVSTISSGGTYIYYPDSVKGRFTISRDNAKNSLYLQMNSLRAEDTAVYYCARLGGDNYYEYWGKGTTVTVSSGGGGSGGGGSGGGGSDIVMTQSPDSLAVSLGERATINCRASKSVSTSGYSYMHWYQQKPGQPPKLLIYLVSNLESGVPDRFSGSGSGTDFTLTISSLQAEDVAVYYCQHIRELTRSEFGGGTKVEIKRT

SEQ ID NO: 252-255 - skipped (4 entries)

SEQ ID NO: 256 - DNA, 1509 bp, Artificial Sequence
  pSECTag2 E6 scFVFC
atggagacagacacactcctgctatgggtactgctgctctgggttccaggttccactggtgacgcggcccagccggccgaggtgcagctggtggagtctgggggaggcctggtcaagcctggggggtccctgagactctcctgtgcagcctctggattcaccttcagtaggtatggcatgagctgggtccgccaggctccagggaagaggctggagtgggtctcaaccattagtggcggaggcacctacatatactacccagactcagtgaagggccgattcaccatctccagagacaacgccaagaacaccctgtatctgcaaatgaacagcctgagagccgaggacacggctgtgtattactgtaccagagataactatggccgcaactatgattatggcatggattattggggccagggcaccctggtgaccgtgagcagcggcggtggcggatccggcggtggcggatccggcggtggcggatccgaaattgtgttgacacagtctccagccaccctgtctttgtctccaggggaaagagccaccctcacctgcagcgccaccagcagtgttagctacatccactggtaccaacagaggcctggccagagccccaggctcctcatctatagcacctccaacctggccagcggcatcccagccaggttcagtggcagtgggtctgggagcgactacactctcaccatcagcagcctagagcctgaagattttgcagtttattactgtcagcagcgtagcagctcccctttcacctttggcagcggcaccaaagtggaaattaaagagcccaaatcttgtgacaaaactcacacatgcccaccgtgcccagcacctgaactcctggggggaccgtcagtcttcctcttccccccaaaacccaaggacaccctcatgatctcccggacccctgaggtcacatgcgtggtggtggacgtgagccacgaagaccctgaggtcaagttcaactggtacgtggacggcgtggaggtgcataatgccaagacaaagccgcgggaggagcagtacaacagcacgtaccgtgtggtcagcgtcctcaccgtcctgcaccaggactggctgaatggcaaggagtacaagtgcaaggtctccaacaaagccctcccagcccccatcgagaaaaccatctccaaagccaaagggcagccccgagaaccacaggtgtacaccctgcccccatcccgggaggagatgaccaagaaccaggtcagcctgacctgcctggtcaaaggcttctatcccagcgacatcgccgtggagtgggagagcaatgggcagccggagaacaactacaagaccacgcctcccgtgctggactccgacggctccttcttcctctacagcaagctcaccgtggacaagagcaggtggcagcaggggaacgtcttctcatgctccgtgatgcatgaggctctgcacaaccactacacgcagaagagcctctccctgtctccgggtaaatgataa

SEQ ID NO: 257 - protein, 501 aa, Artificial Sequence
  pSECTag2 E6 scFVFC
METDTLLLWVLLLWVPGSTGDAAQPAEVQLVESGGGLVKPGGSLRLSCAASGFTFSRYGMSWVRQAPGKRLEWVSTISGGGTYIYYPDSVKGRFTISRDNAKNTLYLQMNSLRAEDTAVYYCTRDNYGRNYDYGMDYWGQGTLVTVSSGGGGSGGGGSGGGGSEIVLTQSPATLSLSPGERATLTCSATSSVSYIHWYQQRPGQSPRLLIYSTSNLASGIPARFSGSGSGSDYTLTISSLEPEDFAVYYCQQRSSSPFTFGSGTKVEIKEPKSCDKTHTCPPCPAPELLGGPSVFLFPPKPKDTLMISRTPEVTCVVVDVSHEDPEVKFNWYVDGVEVHNAKTKPREEQYNSTYRVVSVLTVLHQDWLNGKEYKCKVSNKALPAPIEKTISKAKGQPREPQVYTLPPSREEMTKNQVSLTCLVKGFYPSDIAVEWESNGQPENNYKTTPPVLDSDGSFFLYSKLTVDKSRWQQGNVFSCSVMHEALHNHYTQKSLSLSPGK

SEQ ID NO: 258-271 - skipped (14 entries)

SEQ ID NO: 272 - DNA, 702 bp, Artificial Sequence
  Human IgG1 Fc sequence
gagcccaaatcttgtgacaaaactcacacatgcccaccgtgcccagcacctgaactcctggggggaccgtcagtcttcctcttccccccaaaacccaaggacaccctcatgatctcccggacccctgaggtcacatgcgtggtggtggacgtgagccacgaagaccctgaggtcaagttcaactggtacgtggacggcgtggaggtgcataatgccaagacaaagccgcgggaggagcagtacaacagcacgtaccgtgtggtcagcgtcctcaccgtcctgcaccaggactggctgaatggcaaggagtacaagtgcaaggtctccaacaaagccctcccagcccccatcgagaaaaccatctccaaagccaaagggcagccccgagaaccacaggtgtacaccctgcccccatcccgggaggagatgaccaagaaccaggtcagcctgacctgcctggtcaaaggcttctatcccagcgacatcgccgtggagtgggagagcaatgggcagccggagaacaactacaagaccacgcctcccgtgctggactccgacggctccttcttcctctacagcaagctcaccgtggacaagagcaggtggcagcaggggaacgtcttctcatgctccgtgatgcatgaggctctgcacaaccactacacgcagaagagcctctccctgtctccgggtaaatgataa

SEQ ID NO: 273 - protein, 232 aa, Artificial Sequence
  Human IgG1 Fc sequence
EPKSCDKTHTCPPCPAPELLGGPSVFLFPPKPKDTLMISRTPEVTCVVVDVSHEDPEVKFNWYVDGVEVHNAKTKPREEQYNSTYRVVSVLTVLHQDWLNGKEYKCKVSNKALPAPIEKTISKAKGQPREPQVYTLPPSREEMTKNQVSLTCLVKGFYPSDIAVEWESNGQPENNYKTTPPVLDSDGSFFLYSKLTVDKSRWQQGNVFSCSVMHEALHNHYTQKSLSLSPGK

SEQ ID NO: 274 - DNA, 666 bp, Artificial Sequence
  Human IgG1 CH2CH3 domain sequence
ccgtgcccagcacctgaactcctggggggaccgtcagtcttcctcttccccccaaaacccaaggacaccctcatgatctcccggacccctgaggtcacatgcgtggtggtggacgtgagccacgaagaccctgaggtcaagttcaactggtacgtggacggcgtggaggtgcataatgccaagacaaagccgcgggaggagcagtacaacagcacgtaccgtgtggtcagcgtcctcaccgtcctgcaccaggactggctgaatggcaaggagtacaagtgcaaggtctccaacaaagccctcccagcccccatcgagaaaaccatctccaaagccaaagggcagccccgagaaccacaggtgtacaccctgcccccatcccgggaggagatgaccaagaaccaggtcagcctgacctgcctggtcaaaggcttctatcccagcgacatcgccgtggagtgggagagcaatgggcagccggagaacaactacaagaccacgcctcccgtgctggactccgacggctccttcttcctctacagcaagctcaccgtggacaagagcaggtggcagcaggggaacgtcttctcatgctccgtgatgcatgaggctctgcacaaccactacacgcagaagagcctctccctgtctccgggtaaatgataa

SEQ ID NO: 275 - protein, 220 aa, Artificial Sequence
  Human IgG1 CH2CH3 domain sequence
PCPAPELLGGPSVFLFPPKPKDTLMISRTPEVTCVVVDVSHEDPEVKFNWYVDGVEVHNAKTKPREEQYNSTYRVVSVLTVLHQDWLNGKEYKCKVSNKALPAPIEKTISKAKGQPREPQVYTLPPSREEMTKNQVSLTCLVKGFYPSDIAVEWESNGQPENNYKTTPPVLDSDGSFFLYSKLTVDKSRWQQGNVFSCSVMHEALHNHYTQKSLSLSPGK

SEQ ID NO: 276 - DNA, 327 bp, Artificial Sequence
  Human IgG1 CH3 domain sequence
gggcagccccgagaaccacaggtgtacaccctgcccccatcccgggaggagatgaccaagaaccaggtcagcctgacctgcctggtcaaaggcttctatcccagcgacatcgccgtggagtgggagagcaatgggcagccggagaacaactacaagaccacgcctcccgtgctggactccgacggctccttcttcctctacagcaagctcaccgtggacaagagcaggtggcagcaggggaacgtcttctcatgctccgtgatgcatgaggctctgcacaaccactacacgcagaagagcctctccctgtctccgggtaaatgataa

SEQ ID NO: 277 - protein, 107 aa, Artificial Sequence
  Human IgG1 CH3 domain sequence
GQPREPQVYTLPPSREEMTKNQVSLTCLVKGFYPSDIAVEWESNGQPENNYKTTPPVLDSDGSFFLYSKLTVDKSRWQQGNVFSCSVMHEALHNHYTQKSLSLSPGK

SEQ ID NO: 278-296 - skipped (19 entries)

SEQ ID NO: 297 - DNA, 1464 bp, Artificial Sequence
  CART E6 CD8/CD8/CD28/CD3z sequence - NCD8lshuMNE6scFvCD8ecd fragment CD8 transmembrane CD28 CD3zetaC
atggccctgcccgtgaccgctttgctgctccccctggcgctgctgctgcacgccgccaggccagaggtccagctggttgagagtggcggtgggctggttaagcctggcggctccctgcggctgagctgcgccgcgagtggatttactttcagccgatatgggatgagttgggtgcggcaagctcccgggaagaggctggaatgggtctcaacaatctccggggggggcacttacatctattaccccgactcagtcaaggggagatttaccatttcacgagacaacgctaagaataccctgtatttgcagatgaattctctgagagcagaggacacagctgtttactattgtacccgcgacaactatggcaggaactacgactacggtatggactattggggacaagggacattggttacagtgagcagtggcggcgggggcagcggaggaggaggcagcggtggggggggcagcgagatagtgctcacgcagtcacccgcgactctcagtctctcacctggggaacgagctaccctgacgtgctctgctacctcctcagtgtcatatattcactggtatcagcaacggcccgggcagtcccctagattgctcatttatagtacctctaatctggcctcaggtatccctgcacgattttctggatctggttcaggttctgattacaccctcactatctctagcctggagcctgaagactttgccgtttattactgccagcagaggtctagctccccattcacctttgggagtgggaccaaggttgaaattaaaacgacaaccccggcccccagaccaccaacgccagcccccaccatcgccagccaacccctgtctctgagaccagaagcctgtaggcctgccgccggtggagctgtgcacacaagaggactggatttcgcctgtgatatctacatttgggccccgctcgcaggcacatgtggagtgctcctcctctccctggtgattaccctgtactgcagaagcaagcggtctcggctcctgcattctgattacatgaacatgaccccaagaagaccaggccccaccaggaaacattaccagccctacgctccgccacgcgacttcgctgcctaccggtcccgcgttaagttctcccgatcagccgacgcgcctgcttacaagcagggccagaaccaactgtacaacgagctgaatctcggtagacgggaagagtacgacgtgttggacaaacggagaggccgcgacccagaaatgggcggcaagcctcgcaggaaaaacccccaggagggactgtacaatgagttgcagaaagataagatggcagaagcttatagcgagatcggaatgaagggggaaaggagacgagggaaaggacacgacggcctttatcagggcctgtccacagcaacaaaagatacgtatgacgccctccatatgcaggcacttccaccacggtgataa

SEQ ID NO: 298 - protein, 486 aa, Artificial Sequence
  CART E6 CD8/CD8/CD28/CD3z sequence - NCD8lshuMNE6scFvCD8ecd fragment CD8 transmembrane CD28 CD3zetaC
MALPVTALLLPLALLLHAARPEVQLVESGGGLVKPGGSLRLSCAASGFTFSRYGMSWVRQAPGKRLEWVSTISGGGTYIYYPDSVKGRFTISRDNAKNTLYLQMNSLRAEDTAVYYCTRDNYGRNYDYGMDYWGQGTLVTVSSGGGGSGGGGSGGGGSEIVLTQSPATLSLSPGERATLTCSATSSVSYIHWYQQRPGQSPRLLIYSTSNLASGIPARFSGSGSGSDYTLTISSLEPEDFAVYYCQQRSSSPFTFGSGTKVEIKTTTPAPRPPTPAPTIASQPLSLRPEACRPAAGGAVHTRGLDFACDIYIWAPLAGTCGVLLLSLVITLYCRSKRSRLLHSDYMNMTPRRPGPTRKHYQPYAPPRDFAAYRSRVKFSRSADAPAYKQGQNQLYNELNLGRREEYDVLDKRRGRDPEMGGKPRRKNPQEGLYNELQKDKMAEAYSEIGMKGERRRGKGHDGLYQGLSTATKDTYDALHMQALPPR

SEQ ID NO: 299 - skipped

SEQ ID NO: 300 - DNA, 1467 bp, Artificial Sequence
  CART E6 CD8/CD8/41BB/CD3z sequence - NCD8lshuMNE6scFvCD8ecd fragment CD8 transmembrane 41BB CD3zetaC
atggccctgcccgtgaccgctttgctgctccccctggcgctgctgctgcacgccgccaggccagaggtccagctggttgagagtggcggtgggctggttaagcctggcggctccctgcggctgagctgcgccgcgagtggatttactttcagccgatatgggatgagttgggtgcggcaagctcccgggaagaggctggaatgggtctcaacaatctccggggggggcacttacatctattaccccgactcagtcaaggggagatttaccatttcacgagacaacgctaagaataccctgtatttgcagatgaattctctgagagcagaggacacagctgtttactattgtacccgcgacaactatggcaggaactacgactacggtatggactattggggacaagggacattggttacagtgagcagtggcggcgggggcagcggaggaggaggcagcggtggggggggcagcgagatagtgctcacgcagtcacccgcgactctcagtctctcacctggggaacgagctaccctgacgtgctctgctacctcctcagtgtcatatattcactggtatcagcaacggcccgggcagtcccctagattgctcatttatagtacctctaatctggcctcaggtatccctgcacgattttctggatctggttcaggttctgattacaccctcactatctctagcctggagcctgaagactttgccgtttattactgccagcagaggtctagctccccattcacctttgggagtgggaccaaggttgaaattaaaacgacaaccccggcccccagaccaccaacgccagcccccaccatcgccagccaacccctgtctctgagaccagaagcctgtaggcctgccgccggtggagctgtgcacacaagaggactggatttcgcctgtgatatctacatttgggccccgctcgcaggcacatgtggagtgctcctcctctccctggtgattaccctgtactgcaaaaggggccgcaaaaaactcctttacatttttaagcagccttttatgaggccagtacagacgactcaagaggaagacgggtgctcatgccgctttcctgaggaggaggaaggagggtgcgaactgcgcgttaagttctcccgatcagccgacgcgcctgcttacaagcagggccagaaccaactgtacaacgagctgaatctcggtagacgggaagagtacgacgtgttggacaaacggagaggccgcgacccagaaatgggcggcaagcctcgcaggaaaaacccccaggagggactgtacaatgagttgcagaaagataagatggcagaagcttatagcgagatcggaatgaagggggaaaggagacgagggaaaggacacgacggcctttatcagggcctgtccacagcaacaaaagatacgtatgacgccctccatatgcaggcacttccaccacggtgataa

SEQ ID NO: 301 - protein, 487 aa, Artificial Sequence
  CART E6 CD8/CD8/41BB/CD3z sequence - NCD8lshuMNE6scFvCD8ecd fragment CD8 transmembrane 41BB CD3zetaC
MALPVTALLLPLALLLHAARPEVQLVESGGGLVKPGGSLRLSCAASGFTFSRYGMSWVRQAPGKRLEWVSTISGGGTYIYYPDSVKGRFTISRDNAKNTLYLQMNSLRAEDTAVYYCTRDNYGRNYDYGMDYWGQGTLVTVSSGGGGSGGGGSGGGGSEIVLTQSPATLSLSPGERATLTCSATSSVSYIHWYQQRPGQSPRLLIYSTSNLASGIPARFSGSGSGSDYTLTISSLEPEDFAVYYCQQRSSSPFTFGSGTKVEIKTTTPAPRPPTPAPTIASQPLSLRPEACRPAAGGAVHTRGLDFACDIYIWAPLAGTCGVLLLSLVITLYCKRGRKKLLYIFKQPFMRPVQTTQEEDGCSCRFPEEEEGGCELRVKFSRSADAPAYKQGQNQLYNELNLGRREEYDVLDKRRGRDPEMGGKPRRKNPQEGLYNELQKDKMAEAYSEIGMKGERRRGKGHDGLYQGLSTATKDTYDALHMQALPPR

SEQ ID NO: 302 - skipped

SEQ ID NO: 303 - DNA, 1590 bp, Artificial Sequence
  CART E6 CD8/CD8/CD28/41BB/CD3z sequence - NCD8lshuMNE6scFvCD8ecd fragment CD8 transmembrane CD28 41BB CD3zetaC
atggccctgcccgtgaccgctttgctgctccccctggcgctgctgctgcacgccgccaggccagaggtccagctggttgagagtggcggtgggctggttaagcctggcggctccctgcggctgagctgcgccgcgagtggatttactttcagccgatatgggatgagttgggtgcggcaagctcccgggaagaggctggaatgggtctcaacaatctccggggggggcacttacatctattaccccgactcagtcaaggggagatttaccatttcacgagacaacgctaagaataccctgtatttgcagatgaattctctgagagcagaggacacagctgtttactattgtacccgcgacaactatggcaggaactacgactacggtatggactattggggacaagggacattggttacagtgagcagtggcggcgggggcagcggaggaggaggcagcggtggggggggcagcgagatagtgctcacgcagtcacccgcgactctcagtctctcacctggggaacgagctaccctgacgtgctctgctacctcctcagtgtcatatattcactggtatcagcaacggcccgggcagtcccctagattgctcatttatagtacctctaatctggcctcaggtatccctgcacgattttctggatctggttcaggttctgattacaccctcactatctctagcctggagcctgaagactttgccgtttattactgccagcagaggtctagctccccattcacctttgggagtgggaccaaggttgaaattaaaacgacaaccccggcccccagaccaccaacgccagcccccaccatcgccagccaacccctgtctctgagaccagaagcctgtaggcctgccgccggtggagctgtgcacacaagaggactggatttcgcctgtgatatctacatttgggccccgctcgcaggcacatgtggagtgctcctcctctccctggtgattaccctgtactgcagaagcaagcggtctcggctcctgcattctgattacatgaacatgaccccaagaagaccaggccccaccaggaaacattaccagccctacgctccgccacgcgacttcgctgcctaccggtccaaaaggggccgcaaaaaactcctttacatttttaagcagccttttatgaggccagtacagacgactcaagaggaagacgggtgctcatgccgctttcctgaggaggaggaaggagggtgcgaactgcgcgttaagttctcccgatcagccgacgcgcctgcttacaagcagggccagaaccaactgtacaacgagctgaatctcggtagacgggaagagtacgacgtgttggacaaacggagaggccgcgacccagaaatgggcggcaagcctcgcaggaaaaacccccaggagggactgtacaatgagttgcagaaagataagatggcagaagcttatagcgagatcggaatgaagggggaaaggagacgagggaaaggacacgacggcctttatcagggcctgtccacagcaacaaaagatacgtatgacgccctccatatgcaggcacttccaccacggtgataa

SEQ ID NO: 304 - protein, 528 aa, Artificial Sequence
  CART E6 CD8/CD8/CD28/41BB/CD3z sequence - NCD8lshuMNE6scFvCD8ecd fragment CD8 transmembrane CD28 41BB CD3zetaC
MALPVTALLLPLALLLHAARPEVQLVESGGGLVKPGGSLRLSCAASGFTFSRYGMSWVRQAPGKRLEWVSTISGGGTYIYYPDSVKGRFTISRDNAKNTLYLQMNSLRAEDTAVYYCTRDNYGRNYDYGMDYWGQGTLVTVSSGGGGSGGGGSGGGGSEIVLTQSPATLSLSPGERATLTCSATSSVSYIHWYQQRPGQSPRLLIYSTSNLASGIPARFSGSGSGSDYTLTISSLEPEDFAVYYCQQRSSSPFTFGSGTKVEIKTTTPAPRPPTPAPTIASQPLSLRPEACRPAAGGAVHTRGLDFACDIYIWAPLAGTCGVLLLSLVITLYCRSKRSRLLHSDYMNMTPRRPGPTRKHYQPYAPPRDFAAYRSKRGRKKLLYIFKQPFMRPVQTTQEEDGCSCRFPEEEEGGCELRVKFSRSADAPAYKQGQNQLYNELNLGRREEYDVLDKRRGRDPEMGGKPRRKNPQEGLYNELQKDKMAEAYSEIGMKGERRRGKGHDGLYQGLSTATKDTYDALHMQALPPR

SEQ ID NO: 305 - skipped

SEQ ID NO: 306 - DNA, 1608 bp, Artificial Sequence
  CART C2 CD8/CD8/CD28/41BB/CD3z sequence - NCD8lshuMNC2scFvCD8ecd fragment CD8 transmembrane CD28 41BB CD3zetaC
atggccttgccagtgacggccctgctgctgccattggctcttctgttgcacgctgccaggcctgaagtgcagctcgtagagagtggcgggggactggtgaagcccggtggaagcctcagactcagttgcgccgcctcaggtttcactttttcaggttacgccatgtcctgggtaagacaggcaccggggaaaggactcgagtgggtgtctactatcagctcaggaggcacttatatatattatcctgactctgtaaaaggccgatttacgatttctcgcgacaatgcaaagaactccctctacctccaaatgaacagtcttagggcagaagacactgctgtatactattgtgcacgcctcggcggcgacaactactacgagtactttgacgtgtgggggaaagggactaccgtgacagtttcaagcggaggaggtggctcaggtggaggcgggtcaggggggggaggaagtgatattgtgctcacacaatccccagcctccctggctgtgtctcccggccaacgcgctacaattacatgtcgggcctccaaaagcgtgagcaccagcggctacagctacatgcactggtatcaacagaaaccaggacaaccccccaaactgttgatttatctcgcttcaaacttggagtccggcgtgcctgcgcgcttttcagggagtgggagcggcacagattttacgctgactatcaaccccgtagaagcaaacgatacagcgaattattattgtcaacattcccgggaactcccctttacgttcggcgggggcacaaaggtcgaaattaagagaaccacgacaaccccggcccccagaccaccaacgccagcccccaccatcgccagccaacccctgtctctgagaccagaagcctgtaggcctgccgccggtggagctgtgcacacaagaggactggatttcgcctgtgatatctacatttgggccccgctcgcaggcacatgtggagtgctcctcctctccctggtgattaccctgtactgcagaagcaagcggtctcggctcctgcattctgattacatgaacatgaccccaagaagaccaggccccaccaggaaacattaccagccctacgctccgccacgcgacttcgctgcctaccggtccaaaaggggccgcaaaaaactcctttacatttttaagcagccttttatgaggccagtacagacgactcaagaggaagacgggtgctcatgccgctttcctgaggaggaggaaggagggtgcgaactgcgcgttaagttctcccgatcagccgacgcgcctgcttacaagcagggccagaaccaactgtacaacgagctgaatctcggtagacgggaagagtacgacgtgttggacaaacggagaggccgcgacccagaaatgggcggcaagcctcgcaggaaaaacccccaggagggactgtacaatgagttgcagaaagataagatggcagaagcttatagcgagatcggaatgaagggggaaaggagacgagggaaaggacacgacggcctttatcagggcctgtccacagcaacaaaagatacgtatgacgccctccatatgcaggcacttccaccacggtgataa

SEQ ID NO: 307 - protein, 513 aa, Artificial Sequence
  CART C2 CD8/CD8/CD28/41BB/CD3z sequence - NCD8lshuMNC2scFvCD8ecd fragment CD8 transmembrane CD28 41BB CD3zetaC
EVQLVESGGGLVKPGGSLRLSCAASGFTFSGYAMSWVRQAPGKGLEWVSTISSGGTYIYYPDSVKGRFTISRDNAKNSLYLQMNSLRAEDTAVYYCARLGGDNYYEYFDVWGKGTTVTVSSGGGGSGGGGSGGGGSDIVLTQSPASLAVSPGQRATITCRASKSVSTSGYSYMHWYQQKPGQPPKLLIYLASNLESGVPARFSGSGSGTDFTLTINPVEANDTANYYCQHSRELPFTFGGGTKVEIKRTTTTPAPRPPTPAPTIASQPLSLRPEACRPAAGGAVHTRGLDFACDIYIWAPLAGTCGVLLLSLVITLYCRSKRSRLLHSDYMNMTPRRPGPTRKHYQPYAPPRDFAAYRSKRGRKKLLYIFKQPFMRPVQTTQEEDGCSCRFPEEEEGGCELRVKFSRSADAPAYKQGQNQLYNELNLGRREEYDVLDKRRGRDPEMGGKPRRKNPQEGLYNELQKDKMAEAYSEIGMKGERRRGKGHDGLYQGLSTATKDTYDALHMQALPPR

SEQ ID NO: 308-340 - skipped (33 entries)

SEQ ID NO: 341 - DNA, 729 bp, Artificial Sequence
  Humanized E6 scFV sequence in CAR
gaggtccagctggttgagagtggcggtgggctggttaagcctggcggctccctgcggctgagctgcgccgcgagtggatttactttcagccgatatgggatgagttgggtgcggcaagctcccgggaagaggctggaatgggtctcaacaatctccggggggggcacttacatctattaccccgactcagtcaaggggagatttaccatttcacgagacaacgctaagaataccctgtatttgcagatgaattctctgagagcagaggacacagctgtttactattgtacccgcgacaactatggcaggaactacgactacggtatggactattggggacaagggacattggttacagtgagcagtggcggcgggggcagcggaggaggaggcagcggtggggggggcagcgagatagtgctcacgcagtcacccgcgactctcagtctctcacctggggaacgagctaccctgacgtgctctgctacctcctcagtgtcatatattcactggtatcagcaacggcccgggcagtcccctagattgctcatttatagtacctctaatctggcctcaggtatccctgcacgattttctggatctggttcaggttctgattacaccctcactatctctagcctggagcctgaagactttgccgtttattactgccagcagaggtctagctccccattcacctttgggagtgggaccaaggttgaaattaaa

SEQ ID NO: 342 - protein, 243 aa, Artificial Sequence; identical to SEQ ID NO: 233
  Humanized E6 scFV sequence in CAR

SEQ ID NO: 343 - DNA, 63 bp, Artificial Sequence
  CD8 leader sequence
atggccctgcccgtgaccgctttgctgctccccctggcgctgctgctgcacgccgccaggcca

SEQ ID NO: 344 - protein, 21 aa, Artificial Sequence
  CD8 leader sequence
MALPVTALLLPLALLLHAARP

SEQ ID NO: 345 - DNA, 135 bp, Artificial Sequence
  CD8 hinge domain sequence
acgacaaccccggcccccagaccaccaacgccagcccccaccatcgccagccaacccctgtctctgagaccagaagcctgtaggcctgccgccggtggagctgtgcacacaagaggactggatttcgcctgtgat

SEQ ID NO: 346 - protein, 45 aa, Artificial Sequence
  CD8 hinge domain sequence
TTTPAPRPPTPAPTIASQPLSLRPEACRPAAGGAVHTRGLDFACD

SEQ ID NO: 347 - DNA, 66 bp, Artificial Sequence
  CD4 hinge domain sequence
tcgggacaggtcctgctggaatccaacatcaaggttctgcccacatggtccaccccggtgcagcca

SEQ ID NO: 348 - protein, 22 aa, Artificial Sequence
  CD4 hinge domain sequence
SGQVLLESNIKVLPTWSTPVQP

SEQ ID NO: 349 - DNA, 45 bp, Artificial Sequence
  CD28 hinge domain sequence
aaacacctttgtccaagtcccctatttcccggaccttctaagccc

SEQ ID NO: 350 - protein, 15 aa, Artificial Sequence
  CD28 hinge domain sequence
KHLCPSPLFPGPSKP

SEQ ID NO: 351-360 - skipped (10 entries)

SEQ ID NO: 361 - DNA, 63 bp, Artificial Sequence
  CD3 zeta transmembrane domain sequence
ctctgctacctgctggatggaatcctcttcatctatggtgtcattctcactgccttgttcctg

SEQ ID NO: 362 - protein, 21 aa, Artificial Sequence
  CD3 zeta transmembrane domain sequence
LCYLLDGILFIYGVILTALFL

SEQ ID NO: 363 - DNA, 72 bp, Artificial Sequence
  CD8 transmembrane domain sequence
atctacatttgggccccgctcgcaggcacatgtggagtgctcctcctctccctggtgattaccctgtactgc

SEQ ID NO: 364 - protein, 24 aa, Artificial Sequence
  CD8 transmembrane domain sequence
IYIWAPLAGTCGVLLLSLVITLYC

SEQ ID NO: 365 - DNA, 66 bp, Artificial Sequence
  CD4 transmembrane domain sequence
atggccctgattgtgctggggggcgtcgccggcctcctgcttttcattgggctaggcatcttcttc

SEQ ID NO: 366 - protein, 22 aa, Artificial Sequence
  CD4 transmembrane domain sequence
MALIVLGGVAGLLLFIGLGIFF

SEQ ID NO: 367 - DNA, 81 bp, Artificial Sequence
  CD28 transmembrane domain sequence
ttttgggtgctggtggtggttggtggagtcctggcttgctatagcttgctagtaacagtggcctttattattttctgggtg

SEQ ID NO: 368 - protein, 27 aa, Artificial Sequence
  CD28 transmembrane domain sequence
FWVLVVVGGVLACYSLLVTVAFIIFWV

SEQ ID NO: 369 - DNA, 81 bp, Artificial Sequence
  41BB transmembrane domain sequence
atcatctccttctttcttgcgctgacgtcgactgcgttgctcttcctgctgttcttcctcacgctccgtttctctgttgtt

SEQ ID NO: 370 - protein, 27 aa, Artificial Sequence
  41BB transmembrane domain sequence
IISFFLALTSTALLFLLFFLTLRFSVV

SEQ ID NO: 371 - DNA, 78 bp, Artificial Sequence
  OX40 transmembrane domain sequence
gttgccgccatcctgggcctgggcctggtgctggggctgctgggccccctggccatcctgctggccctgtacctgctc

SEQ ID NO: 372 - protein, 26 aa, Artificial Sequence
  OX40 transmembrane domain sequence
VAAILGLGLVLGLLGPLAILLALYLL

SEQ ID NO: 373 - DNA, 336 bp, Artificial Sequence
  CD3 zeta domain sequence
cgcgttaagttctcccgatcagccgacgcgcctgcttacaagcagggccagaaccaactgtacaacgagctgaatctcggtagacgggaagagtacgacgtgttggacaaacggagaggccgcgacccagaaatgggcggcaagcctcgcaggaaaaacccccaggagggactgtacaatgagttgcagaaagataagatggcagaagcttatagcgagatcggaatgaagggggaaaggagacgagggaaaggacacgacggcctttatcagggcctgtccacagcaacaaaagatacgtatgacgccctccatatgcaggcacttccaccacgg

SEQ ID NO: 374 - protein, 112 aa, Artificial Sequence
  CD3 zeta domain sequence
RVKFSRSADAPAYKQGQNQLYNELNLGRREEYDVLDKRRGRDPEMGGKPRRKNPQEGLYNELQKDKMAEAYSEIGMKGERRRGKGHDGLYQGLSTATKDTYDALHMQALPPR

SEQ ID NO: 375 - DNA, 336 bp, Artificial Sequence
  CD3 zeta domain variant sequence
agagtgaagttcagcaggagcgcagacgcccccgcgtaccagcagggccagaaccagctctataacgagctcaatctaggacgaagagaggagtacgatgttttggacaagagacgtggccgggaccctgagatggggggaaagccgagaaggaagaaccctcaggaaggcctgtacaatgaactgcagaaagataagatggcggaggcctacagtgagattgggatgaaaggcgagcgccggaggggcaaggggcacgatggcctttaccagggtctcagtacagccaccaaggacacctacgacgcccttcacatgcaggccctgccccctcgc

SEQ ID NO: 376 - protein, 112 aa, Artificial Sequence
  CD3 zeta domain variant sequence
RVKFSRSADAPAYQQGQNQLYNELNLGRREEYDVLDKRRGRDPEMGGKPRRKNPQEGLYNELQKDKMAEAYSEIGMKGERRRGKGHDGLYQGLSTATKDTYDALHMQALPPR

SEQ ID NO: 377 - DNA, 123 bp, Artificial Sequence
  CD28 domain sequence
agaagcaagcggtctcggctcctgcattctgattacatgaacatgaccccaagaagaccaggccccaccaggaaacattaccagccctacgctccgccacgcgacttcgctgcctaccggtcc

SEQ ID NO: 378 - protein, 41 aa, Artificial Sequence
  CD28 domain sequence
RSKRSRLLHSDYMNMTPRRPGPTRKHYQPYAPPRDFAAYRS

SEQ ID NO: 379 - DNA, 126 bp, Artificial Sequence
  41BB domain sequence
aaaaggggccgcaaaaaactcctttacatttttaagcagccttttatgaggccagtacagacgactcaagaggaagacgggtgctcatgccgctttcctgaggaggaggaaggagggtgcgaactg

SEQ ID NO: 380 - protein, 42 aa, Artificial Sequence
  41BB domain sequence
KRGRKKLLYIFKQPFMRPVQTTQEEDGCSCRFPEEEEGGCEL

SEQ ID NO: 381-390 - skipped (10 entries)

SEQ ID NO: 391 - DNA, 729 bp, Artificial Sequence; identical to SEQ ID NO: 232
  HumanizeE6 scFV (VHVL) sequence

SEQ ID NO: 392 - protein, 243 aa, Artificial Sequence; identical to SEQ ID NO: 233
  HumanizeE6 scFV (VHVL) sequence

SEQ ID NO: 393 - DNA, 729 bp, Artificial Sequence
  HumanizeE6 scFV (VLVH) sequence
gaaattgtgttgacacagtctccagccaccctgtctttgtctccaggggaaagagccaccctcacctgcagcgccaccagcagtgttagctacatccactggtaccaacagaggcctggccagagccccaggctcctcatctatagcacctccaacctggccagcggcatcccagccaggttcagtggcagtgggtctgggagcgactacactctcaccatcagcagcctagagcctgaagattttgcagtttattactgtcagcagcgtagcagctcccctttcacctttggcagcggcaccaaagtggaaattaaaggcggtggcggatccggcggtggcggatccggcggtggcggatccgaggtgcagctggtggagtctgggggaggcctggtcaagcctggggggtccctgagactctcctgtgcagcctctggattcaccttcagtaggtatggcatgagctgggtccgccaggctccagggaagaggctggagtgggtctcaaccattagtggcggaggcacctacatatactacccagactcagtgaagggccgattcaccatctccagagacaacgccaagaacaccctgtatctgcaaatgaacagcctgagagccgaggacacggctgtgtattactgtaccagagataactatggccgcaactatgattatggcatggattattggggccagggcaccctggtgaccgtgagcagc

SEQ ID NO: 394 - protein, 243 aa, Artificial Sequence
  HumanizeE6 scFV (VLVH) sequence
EIVLTQSPATLSLSPGERATLTCSATSSVSYIHWYQQRPGQSPRLLIYSTSNLASGIPARFSGSGSGSDYTLTISSLEPEDFAVYYCQQRSSSPFTFGSGTKVEIKGGGGSGGGGSGGGGSEVQLVESGGGLVKPGGSLRLSCAASGFTFSRYGMSWVRQAPGKRLEWVSTISGGGTYIYYPDSVKGRFTISRDNAKNTLYLQMNSLRAEDTAVYYCTRDNYGRNYDYGMDYWGQGTLVTVSS

SEQ ID NO: 395 - DNA, 747 bp, Artificial Sequence; identical to SEQ ID NO: 238
  HumanizeC2 scFV (VHVL) sequence

SEQ ID NO: 396 - protein, 249 aa, Artificial Sequence; identical to SEQ ID NO: 239
  HumanizeC2 scFV (VHVL) sequence

SEQ ID NO: 397 - DNA, 747 bp, Artificial Sequence
  HumanizeE6 scFV (VLVH) sequence
gacattgtgctgacccagtctccagcctccttggccgtgtctccaggacagagggccaccatcacctgcagagccagtaagagtgtcagtaccagcggatactcctacatgcactggtatcagcagaaaccaggacaacctcctaaactcctgatttacctggcatccaatctggagagcggggtcccagccaggttcagcggcagtgggtctgggaccgatttcaccctcacaattaatcctgtggaagctaatgatactgcaaattattactgtcagcacagtagggagctgcctttcacattcggcggagggaccaaggtggagatcaaacgaactggcggtggcggatccggcggtggcggatccggcggtggcggatccgaggtgcagctggtggagtctgggggaggcctggtcaagcctggggggtccctgagactctcctgtgcagcctctggattcaccttcagtggctatgccatgagctgggtccgccaggctccagggaaggggctggagtgggtctcaaccattagtagtggcggaacctacatatactaccccgactcagtgaagggccgattcaccatctccagagacaacgccaagaactcactgtatctgcaaatgaacagcctgagagccgaggacacggccgtgtattactgtgcgagacttgggggggataattactacgaatacttcgatgtctggggcaaagggaccacggtcaccgtctcctcc

SEQ ID NO: 398 - protein, 249 aa, Artificial Sequence
  HumanizeE6 scFV (VLVH) sequence
DIVLTQSPASLAVSPGQRATITCRASKSVSTSGYSYMHWYQQKPGQPPKLLIYLASNLESGVPARFSGSGSGTDFTLTINPVEANDTANYYCQHSRELPFTFGGGTKVEIKRTGGGGSGGGGSGGGGSEVQLVESGGGLVKPGGSLRLSCAASGFTFSGYAMSWVRQAPGKGLEWVSTISSGGTYIYYPDSVKGRFTISRDNAKNSLYLQMNSLRAEDTAVYYCARLGGDNYYEYFDVWGKGTTVTVSS

SEQ ID NO: 399 - DNA, 15 bp, Artificial Sequence
  G4S1 linker sequence
ggcggtggcggatcc

SEQ ID NO: 400 - protein, 5 aa, Artificial Sequence
  G4S1 linker sequence
GGGGS

SEQ ID NO: 401 - DNA, 45 bp, Artificial Sequence
  [G4S1]x3 linker sequence
ggcggtggcggatccggcggtggcggatccggcggtggcggatcc

SEQ ID NO: 402 - protein, 15 aa, Artificial Sequence
  [G4S1]x3 linker sequence
GGGGSGGGGSGGGGS

SEQ ID NO: 403 - DNA, 24 bp, Artificial Sequence
  8 aa GS linker sequence
ggcggttccggcggtggatccgga

SEQ ID NO: 404 - protein, 8 aa, Artificial Sequence
  8 aa GS linker sequence
GGSGGGSG

SEQ ID NO: 405 - DNA, 39 bp, Artificial Sequence
  12 aa GS linker sequence
ggcggttccggcggtggatccggcggtggcggatccgga

SEQ ID NO: 406 - protein, 12 aa, Artificial Sequence
  12 aa GS linker sequence
GGSGGGSGGGSG

SEQ ID NO: 407 - DNA, 39 bp, Artificial Sequence
  13 aa GS linker sequence
ggcggtggatccggcggtggcggatccggcggtggatcc

SEQ ID NO: 408 - protein, 13 aa, Artificial Sequence
  13 aa GS linker sequence
GGGSGGGGSGGGS

SEQ ID NO: 409 - DNA, 66 bp, Artificial Sequence
  22 aa GS linker sequence
ggcggtggaagcggcggtggcggatccggcagcggcggaagcggcggtggcggatccggcggtgga

SEQ ID NO: 410 - protein, 22 aa, Artificial Sequence
  22 aa GS linker sequence
GGGSGGGGSGSGGSGGGGSGGG

SEQ ID NO: 411 - DNA, 78 bp, Artificial Sequence
  24 aa GS linker sequence
ggcggttccggcggtggatccggcggtggcggatccggaggcggttccggcggtggatccggcggtggcggatccgga

SEQ ID NO: 412 - protein, 24 aa, Artificial Sequence
  24 aa GS linker sequence
GGSGGGSGGGSGGGSGGGSGGGSG

SEQ ID NO: 413 - DNA, 357 bp, Artificial Sequence
  Mouse C3 Heavy chain variable region sequence
caggtccagctgcagcagtctgggcctgagctggtgaggcctggggtctcagtgaagatttcctgcaagggttccggctacagattcactgattatgctatgaactgggtgaagcagagtcatgcaaagagtctagagtggattggagttattagtactttctctggtaatacaaacttcaaccagaagtttaagggcaaggccacaatgactgtagacaaatcctccagcacagcctatatggaacttgccagattgacatctgaggattctgccatgtattactgtgcaagatcggattactacggcccatactttgactactggggccaaggcaccactctcacagtctcctca

SEQ ID NO: 414 - protein, 119 aa, Artificial Sequence
  Mouse C3 Heavy chain variable region sequence
QVQLQQSGPELVRPGVSVKISCKGSGYRFTDYAMNWVKQSHAKSLEWIGVISTFSGNTNFNQKFKGKATMTVDKSSSTAYMELARLTSEDSAMYYCARSDYYGPYFDYWGQGTTLTVSS

SEQ ID NO: 415 - DNA, 90 bp, Artificial Sequence
  Mouse C3 heavy chain variable framework region 1 (FWR1) sequence
caggtccagctgcagcagtctgggcctgagctggtgaggcctggggtctcagtgaagatttcctgcaagggttccggctacagattcact

SEQ ID NO: 416 - protein, 30 aa, Artificial Sequence
  Mouse C3 heavy chain variable framework region 1 (FWR1) sequence
QVQLQQSGPELVRPGVSVKISCKGSGYRFT

SEQ ID NO: 417 - DNA, 15 bp, Artificial Sequence
  Mouse C3 heavy chain variable complementarity determining regions 1 (CDR1) sequence
gattatgctatgaac

SEQ ID NO: 418 - protein, 5 aa, Artificial Sequence
  Mouse C3 heavy chain variable complementarity determining regions 1 (CDR1) sequence
DYAMN

SEQ ID NO: 419 - DNA, 42 bp, Artificial Sequence
  Mouse C3 heavy chain variable framework region 2 (FWR2) sequence
tgggtgaagcagagtcatgcaaagagtctagagtggattgga

SEQ ID NO: 420 - protein, 14 aa, Artificial Sequence
  Mouse C3 heavy chain variable framework region 2 (FWR2) sequence
WVKQSHAKSLEWIG

SEQ ID NO: 421 - DNA, 51 bp, Artificial Sequence
  Mouse C3 heavy chain variable complementarity determining regions 2 (CDR2) sequence
gttattagtactttctctggtaatacaaacttcaaccagaagtttaagggc

SEQ ID NO: 422 - protein, 17 aa, Artificial Sequence
  Mouse C3 heavy chain variable complementarity determining regions 2 (CDR2) sequence
VISTFSGNTNFNQKFKG

SEQ ID NO: 423 - DNA, 96 bp, Artificial Sequence
  Mouse C3 heavy chain variable framework region 3 (FWR3) acid sequence
aaggccacaatgactgtagacaaatcctccagcacagcctatatggaacttgccagattgacatctgaggattctgccatgtattactgtgcaaga

SEQ ID NO: 424 - protein, 32 aa, Artificial Sequence
  Mouse C3 heavy chain variable framework region 3 (FWR3) acid sequence
KATMTVDKSSSTAYMELARLTSEDSAMYYCAR

SEQ ID NO: 425 - DNA, 30 bp, Artificial Sequence
  Mouse C3 heavy chain variable complementarity determining regions 3 (CDR3) sequence
tcggattactacggcccatactttgactac

SEQ ID NO: 426 - protein, 10 aa, Artificial Sequence
  Mouse C3 heavy chain variable complementarity determining regions 3 (CDR3) sequence
SDYYGPYFDY

SEQ ID NO: 427-438 - skipped (12 entries)

SEQ ID NO: 439 - DNA, 357 bp, Artificial Sequence
  Humanized C3 heavy chain variable region sequence from IGHV118*04
caggttcagctggtgcagtctggagctgaggtgaagaagcctggggcctcagtgaaggtctcctgcaaggcttctggttacacctttaccgactacgccatgaactgggtgcgacaggcccctggacaagggcttgagtggatgggagtgatcagcaccttcagcggtaacacaaacttcaaccagaagttcaagggcagagtcaccatgaccacagacacatccacgagcacagcctacatggagctgaggagcctgagatctgacgacacggccgtgtattactgtgcgagaagcgactactacggcccatacttcgactactggggccagggcaccaccctgaccgtgtccagc

SEQ ID NO: 440 - protein, 119 aa, Artificial Sequence
  Humanized C3 heavy chain variable region sequence from IGHV118*04
QVQLVQSGAEVKKPGASVKVSCKASGYTFTDYAMNWVRQAPGQGLEWMGVISTFSGNTNFNQKFKGRVTMTTDTSTSTAYMELRSLRSDDTAVYYCARSDYYGPYFDYWGQGTTLTVSS

SEQ ID NO: 441 - DNA, 90 bp, Artificial Sequence
  Humanized C3 heavy chain variable framework region 1 (FWR1) acid sequence
caggttcagctggtgcagtctggagctgaggtgaagaagcctggggcctcagtgaaggtctcctgcaaggcttctggttacacctttacc

SEQ ID NO: 442 - protein, 30 aa, Artificial Sequence
  Humanized C3 heavy chain variable framework region 1 (FWR1) acid sequence
QVQLVQSGAEVKKPGASVKVSCKASGYTFT

SEQ ID NO: 443 - DNA, 15 bp, Artificial Sequence
  Humanized C3 heavy chain variable complementarity determining regions 1 (CDR1) sequence
gactacgccatgaac

SEQ ID NO: 444 - protein, 5 aa, Artificial Sequence
  Humanized C3 heavy chain variable complementarity determining regions 1 (CDR1) sequence
DYAMN

SEQ ID NO: 445 - DNA, 42 bp, Artificial Sequence
  Humanized C3 heavy chain variable framework region 2 (FWR2) acid sequence
tgggtgcgacaggcccctggacaagggcttgagtggatggga

SEQ ID NO: 446 - protein, 14 aa, Artificial Sequence
  Humanized C3 heavy chain variable framework region 2 (FWR2) acid sequence
WVRQAPGQGLEWMG

SEQ ID NO: 447 - DNA, 51 bp, Artificial Sequence
  Humanized C3 heavy chain variable complementarity determining regions 2 (CDR2) sequence
gtgatcagcaccttcagcggtaacacaaacttcaaccagaagttcaagggc

SEQ ID NO: 448 - protein, 17 aa, Artificial Sequence
  Humanized C3 heavy chain variable complementarity determining regions 2 (CDR2) sequence
VISTFSGNTNFNQKFKG

SEQ ID NO: 449 - DNA, 96 bp, Artificial Sequence
  Humanized C3 heavy chain variable framework region 3 (FWR3) acid sequence
agagtcaccatgaccacagacacatccacgagcacagcctacatggagctgaggagcctgagatctgacgacacggccgtgtattactgtgcgaga

SEQ ID NO: 450 - protein, 32 aa, Artificial Sequence
  Humanized C3 heavy chain variable framework region 3 (FWR3) acid sequence
RVTMTTDTSTSTAYMELRSLRSDDTAVYYCAR

SEQ ID NO: 451 - DNA, 30 bp, Artificial Sequence
  Humanized C3 heavy chain variable complementarity determining regions 3 (CDR3) sequence
agcgactactacggcccatacttcgactac

SEQ ID NO: 452 - protein, 10 aa, Artificial Sequence
  Humanized C3 heavy chain variable complementarity determining regions 3 (CDR3) sequence
SDYYGPYFDY

SEQ ID NO: 453 - DNA, 1353 bp, Artificial Sequence
  Humanized C3 IgG1 heavy chain sequence
caggttcagctggtgcagtctggagctgaggtgaagaagcctggggcctcagtgaaggtctcctgcaaggcttctggttacacctttaccgactacgccatgaactgggtgcgacaggcccctggacaagggcttgagtggatgggagtgatcagcaccttcagcggtaacacaaacttcaaccagaagttcaagggcagagtcaccatgaccacagacacatccacgagcacagcctacatggagctgaggagcctgagatctgacgacacggccgtgtattactgtgcgagaagcgactactacggcccatacttcgactactggggccagggcaccaccctgaccgtgtccagcgctagcaccaagggcccatcggtcttccccctggcaccctcctccaagagcacctctgggggcacagcggccctgggctgcctggtcaaggactacttccccgaaccggtgacggtgtcgtggaactcaggcgccctgaccagcggcgtgcacaccttcccggctgtcctacagtcctcaggactctactccctcagcagcgtggtgacagtgccctccagcagcttgggcacccagacctacatctgcaacgtgaatcacaagcccagcaacaccaaggtggacaagaaagttgagcccaaatcttgtgacaaaactcacacatgcccaccgtgcccagcacctgaactcctggggggaccgtcagtcttcctcttccccccaaaacccaaggacaccctcatgatctcccggacccctgaggtcacatgcgtggtggtggacgtgagccacgaagaccctgaggtcaagttcaactggtacgtggacggcgtggaggtgcataatgccaagacaaagccgcgggaggagcagtacaacagcacgtaccgtgtggtcagcgtcctcaccgtcctgcaccaggactggctgaatggcaaggagtacaagtgcaaggtctccaacaaagccctcccagcccccatcgagaaaaccatctccaaagccaaagggcagccccgagaaccacaggtgtacaccctgcccccatcccgggaggagatgaccaagaaccaggtcagcctgacctgcctggtcaaaggcttctatcccagcgacatcgccgtggagtgggagagcaatgggcagccggagaacaactacaagaccacgcctcccgtgctggactccgacggctccttcttcctctacagcaagctcaccgtggacaagagcaggtggcagcaggggaacgtcttctcatgctccgtgatgcatgaggctctgcacaaccactacacgcagaagagcctctccctgtctccgggtaaatgataa

SEQ ID NO: 454 - protein, 449 aa, Artificial Sequence
  Humanized C3 IgG1 heavy chain sequence
QVQLVQSGAEVKKPGASVKVSCKASGYTFTDYAMNWVRQAPGQGLEWMGVISTFSGNTNFNQKFKGRVTMTTDTSTSTAYMELRSLRSDDTAVYYCARSDYYGPYFDYWGQGTTLTVSSASTKGPSVFPLAPSSKSTSGGTAALGCLVKDYFPEPVTVSWNSGALTSGVHTFPAVLQSSGLYSLSSVVTVPSSSLGTQTYICNVNHKPSNTKVDKKVEPKSCDKTHTCPPCPAPELLGGPSVFLFPPKPKDTLMISRTPEVTCVVVDVSHEDPEVKFNWYVDGVEVHNAKTKPREEQYNSTYRVVSVLTVLHQDWLNGKEYKCKVSNKALPAPIEKTISKAKGQPREPQVYTLPPSREEMTKNQVSLTCLVKGFYPSDIAVEWESNGQPENNYKTTPPVLDSDGSFFLYSKLTVDKSRWQQGNVFSCSVMHEALHNHYTQKSLSLSPGK

SEQ ID NO: 455 - DNA, 1341 bp, Artificial Sequence
  Humanized C3 IgG2 heavy chain sequence
caggttcagctggtgcagtctggagctgaggtgaagaagcctggggcctcagtgaaggtctcctgcaaggcttctggttacacctttaccgactacgccatgaactgggtgcgacaggcccctggacaagggcttgagtggatgggagtgatcagcaccttcagcggtaacacaaacttcaaccagaagttcaagggcagagtcaccatgaccacagacacatccacgagcacagcctacatggagctgaggagcctgagatctgacgacacggccgtgtattactgtgcgagaagcgactactacggcccatacttcgactactggggccagggcaccaccctgaccgtgtccagcgcctccaccaagggcccatcggtcttccccctggcgccctgctccaggagcacctccgagagcacagccgccctgggctgcctggtcaaggactacttccccgaaccggtgacggtgtcgtggaactcaggcgctctgaccagcggcgtgcacaccttcccagctgtcctacagtcctcaggactctactccctcagcagcgtggtgaccgtgccctccagcaacttcggcacccagacctacacctgcaacgtagatcacaagcccagcaacaccaaggtggacaagacagttgagcgcaaatgttgtgtcgagtgcccaccgtgcccagcaccacctgtggcaggaccgtcagtcttcctcttccccccaaaacccaaggacaccctcatgatctcccggacccctgaggtcacgtgcgtggtggtggacgtgagccacgaagaccccgaggtccagttcaactggtacgtggacggcgtggaggtgcataatgccaagacaaagccacgggaggagcagttcaacagcacgttccgtgtggtcagcgtcctcaccgttgtgcaccaggactggctgaacggcaaggagtacaagtgcaaggtctccaacaaaggcctcccagcccccatcgagaaaaccatctccaaaaccaaagggcagccccgagaaccacaggtgtacaccctgcccccatcccgggaggagatgaccaagaaccaggtcagcctgacctgcctggtcaaaggcttctaccccagcgacatcgccgtggagtgggagagcaatgggcagccggagaacaactacaagaccacacctcccatgctggactccgacggctccttcttcctctacagcaagctcaccgtggacaagagcaggtggcagcaggggaacgtcttctcatgctccgtgatgcatgaggctctgcacaaccactacacgcagaagagcctctccctgtctccgggtaaatagtaa

SEQ ID NO: 456 - protein, 445 aa, Artificial Sequence
  Humanized C3 IgG2 heavy chain sequence
QVQLVQSGAEVKKPGASVKVSCKASGYTFTDYAMNWVRQAPGQGLEWMGVISTFSGNTNFNQKFKGRVTMTTDTSTSTAYMELRSLRSDDTAVYYCARSDYYGPYFDYWGQGTTLTVSSASTKGPSVFPLAPCSRSTSESTAALGCLVKDYFPEPVTVSWNSGALTSGVHTFPAVLQSSGLYSLSSVVTVPSSNFGTQTYTCNVDHKPSNTKVDKTVERKCCVECPPCPAPPVAGPSVFLFPPKPKDTLMISRTPEVTCVVVDVSHEDPEVQFNWYVDGVEVHNAKTKPREEQFNSTFRVVSVLTVVHQDWLNGKEYKCKVSNKGLPAPIEKTISKTKGQPREPQVYTLPPSREEMTKNQVSLTCLVKGFYPSDIAVEWESNGQPENNYKTTPPMLDSDGSFFLYSKLTVDKSRWQQGNVFSCSVMHEALHNHYTQKSLSLSPGK

SEQ ID NO: 457 - skipped

SEQ ID NO: 458 - DNA, 336 bp, Artificial Sequence
  Mouse C3 Light Chain variable region sequence
gatgttttgatgacccaaactccactctccctgcctgtcagtcttggagatcaagcctccatctcttgcagatctagtcagaccattgtacatagtaatggaaacacctatttagaatggtacctgcagaaaccaggccagtctccaaagctcctgatctacaaagtttccaaccgattttctggggtcccagacaggttcagtggcagtggatcagggacagatttcacactcaagatcaacagagtggaggctgaggatctgggagtttattactgctttcaaggttcacatgttccattcacgttcggctcggggacaaagttggaaataaaa

SEQ ID NO: 459 - protein, 112 aa, Artificial Sequence
  Mouse C3 Light Chain variable region sequence
DVLMTQTPLSLPVSLGDQASISCRSSQTIVHSNGNTYLEWYLQKPGQSPKLLIYKVSNRFSGVPDRFSGSGSGTDFTLKINRVEAEDLGVYYCFQGSHVPFTFGSGTKLEIK

SEQ ID NO: 460 - DNA, 69 bp, Artificial Sequence
  Mouse C3 light chain variable framework region 1 (FWR1) sequence
gatgttttgatgacccaaactccactctccctgcctgtcagtcttggagatcaagcctccatctcttgc

SEQ ID NO: 461 - protein, 23 aa, Artificial Sequence
  Mouse C3 light chain variable framework region 1 (FWR1) sequence
DVLMTQTPLSLPVSLGDQASISC

SEQ ID NO: 462 - DNA, 48 bp, Artificial Sequence
  Mouse C3 light chain variable complementarity determining regions 1 (CDR1) sequence
agatctagtcagaccattgtacatagtaatggaaacacctatttagaa

SEQ ID NO: 463 - protein, 16 aa, Artificial Sequence
  Mouse C3 light chain variable complementarity determining regions 1 (CDR1) sequence
RSSQTIVHSNGNTYLE

SEQ ID NO: 464 - DNA, 45 bp, Artificial Sequence
  Mouse C3 light chain variable framework region 2 (FWR2) sequence
tggtacctgcagaaaccaggccagtctccaaagctcctgatctac

SEQ ID NO: 465 - protein, 15 aa, Artificial Sequence
  Mouse C3 light chain variable framework region 2 (FWR2) sequence
WYLQKPGQSPKLLIY

SEQ ID NO: 466 - DNA, 21 bp, Artificial Sequence
  Mouse C3 light chain variable complementarity determining regions 2 (CDR2) sequence
aaagtttccaaccgattttct

SEQ ID NO: 467 - protein, 7 aa, Artificial Sequence
  Mouse C3 light chain variable complementarity determining regions 2 (CDR2) sequence
KVSNRFS

SEQ ID NO: 468 - DNA, 96 bp, Artificial Sequence
  Mouse C3 light chain variable framework region 3 (FWR3) sequence
ggggtcccagacaggttcagtggcagtggatcagggacagatttcacactcaagatcaacagagtggaggctgaggatctgggagtttattactgc

SEQ ID NO: 469 - protein, 32 aa, Artificial Sequence
  Mouse C3 light chain variable framework region 3 (FWR3) sequence
GVPDRFSGSGSGTDFTLKINRVEAEDLGVYYC

SEQ ID NO: 470 - DNA, 27 bp, Artificial Sequence
  Mouse C3 light chain variable complementarity determining regions 3 (CDR3) sequence
tttcaaggttcacatgttccattcacg

SEQ ID NO: 471 - protein, 9 aa, Artificial Sequence
  Mouse C3 light chain variable complementarity determining regions 3 (CDR3) sequence
FQGSHVPFT

SEQ ID NO: 472-485 - skipped (14 entries)

SEQ ID NO: 486 - DNA, 342 bp, Artificial Sequence
  Humanized C3 light chain variable region sequence from IGKV229*03
gatattgtgatgacccagactccactctctctgtccgtcacccctggacagccggcctccatctcctgcaggtctagtcagaccattgtccatagtaatggaaacacctatttggagtggtacctgcagaagccaggccagtctccacagctcctgatctataaggtttccaaccggttctctggagtgccagataggttcagtggcagcgggtcagggacagatttcacactgaaaatcagccgggtggaggctgaggatgttggggtttattactgcttccaaggtagccacgtgcctttcaccttcggcggagggaccaaggtggagatcaaacgaact

SEQ ID NO: 487 - protein, 114 aa, Artificial Sequence
  Humanized C3 light chain variable region sequence from IGKV229*03
DIVMTQTPLSLSVTPGQPASISCRSSQTIVHSNGNTYLEWYLQKPGQSPQLLIYKVSNRFSGVPDRFSGSGSGTDFTLKISRVEAEDVGVYYCFQGSHVPFTFGGGTKVEIKRT

SEQ ID NO: 488 - DNA, 69 bp, Artificial Sequence
  Humanized C3 light chain variable framework region 1 (FWR1) acid sequence
gatattgtgatgacccagactccactctctctgtccgtcacccctggacagccggcctccatctcctgc

SEQ ID NO: 489 - protein, 23 aa, Artificial Sequence
  Humanized C3 light chain variable framework region 1 (FWR1) acid sequence
DIVMTQTPLSLSVTPGQPASISC

SEQ ID NO: 490 - DNA, 47 bp, Artificial Sequence
  Humanized C3 light chain variable complementarity determining regions 1 (CDR1) sequence
ggtctagtcagaccattgtccatagtaatggaaacacctatttggag

SEQ ID NO: 491 - protein, 16 aa, Artificial Sequence
  Humanized C3 light chain variable complementarity determining regions 1 (CDR1) sequence
RSSQTIVHSNGNTYLE

SEQ ID NO: 492 - DNA, 45 bp, Artificial Sequence
  Humanized C3 light chain variable framework region 2 (FWR2) acid sequence
tggtacctgcagaagccaggccagtctccacagctcctgatctat

SEQ ID NO: 493 - protein, 15 aa, Artificial Sequence
  Humanized C3 light chain variable framework region 2 (FWR2) acid sequence
WYLQKPGQSPQLLIY

SEQ ID NO: 494 - DNA, 21 bp, Artificial Sequence
  Humanized C3 light chain variable complementarity determining regions 2 (CDR2) sequence
aaggtttccaaccggttctct

SEQ ID NO: 495 - protein, 7 aa, Artificial Sequence
  Humanized C3 light chain variable complementarity determining regions 2 (CDR2) sequence
KVSNRFS

SEQ ID NO: 496 - DNA, 96 bp, Artificial Sequence
  Humanized C3 light chain variable framework region 3 (FWR3) acid sequence
ggagtgccagataggttcagtggcagcgggtcagggacagatttcacactgaaaatcagccgggtggaggctgaggatgttggggtttattactgc

SEQ ID NO: 497 - protein, 32 aa, Artificial Sequence
  Humanized C3 light chain variable framework region 3 (FWR3) acid sequence
GVPDRFSGSGSGTDFTLKISRVEAEDVGVYYC

SEQ ID NO: 498 - DNA, 27 bp, Artificial Sequence
  Humanized C3 light chain variable complementarity determining regions 3 (CDR3) sequence
ttccaaggtagccacgtgcctttcacc

SEQ ID NO: 499 - protein, 9 aa, Artificial Sequence
  Humanized C3 light chain variable complementarity determining regions 3 (CDR3) sequence
FQGSHVPFT

SEQ ID NO: 500 - DNA, 666 bp, Artificial Sequence
  Humanized C3 lambda light chain sequence
gatattgtgatgacccagactccactctctctgtccgtcacccctggacagccggcctccatctcctgcaggtctagtcagaccattgtccatagtaatggaaacacctatttggagtggtacctgcagaagccaggccagtctccacagctcctgatctataaggtttccaaccggttctctggagtgccagataggttcagtggcagcgggtcagggacagatttcacactgaaaatcagccgggtggaggctgaggatgttggggtttattactgcttccaaggtagccacgtgcctttcaccttcggcggagggaccaaggtggagatcaaacgaactggtcagcccaaggctgccccctcggtcactctgttcccgccctcctctgaggagcttcaagccaacaaggccacactggtgtgtctcataagtgacttctacccgggagccgtgacagtggcctggaaggcagatagcagccccgtcaaggcgggagtggagaccaccacaccctccaaacaaagcaacaacaagtacgcggccagcagctatctgagcctgacgcctgagcagtggaagtcccacagaagctacagctgccaggtcacgcatgaagggagcaccgtggagaagacagtggcccctacagaatgttcatagtaa

SEQ ID NO: 501 - protein, 220 aa, Artificial Sequence
  Humanized C3 lambda light chain sequence
DIVMTQTPLSLSVTPGQPASISCRSSQTIVHSNGNTYLEWYLQKPGQSPQLLIYKVSNRFSGVPDRFSGSGSGTDFTLKISRVEAEDVGVYYCFQGSHVPFTFGGGTKVEIKRTGQPKAAPSVTLFPPSSEELQANKATLVCLISDFYPGAVTVAWKADSSPVKAGVETTTPSKQSNNKYAASSYLSLTPEQWKSHRSYSCQVTHEGSTVEKTVAPTECS

SEQ ID NO: 502 - DNA, 666 bp, Artificial Sequence
  Humanized C3 Kappa light chain
gatattgtgatgacccagactccactctctctgtccgtcacccctggacagccggcctccatctcctgcaggtctagtcagaccattgtccatagtaatggaaacacctatttggagtggtacctgcagaagccaggccagtctccacagctcctgatctataaggtttccaaccggttctctggagtgccagataggttcagtggcagcgggtcagggacagatttcacactgaaaatcagccgggtggaggctgaggatgttggggtttattactgcttccaaggtagccacgtgcctttcaccttcggcggagggaccaaggtggagatcaaacgaactacggtggctgcaccatctgtcttcatcttcccgccatctgatgagcagttgaaatctggaactgcctctgttgtgtgcctgctgaataacttctatcccagagaggccaaagtacagtggaaggtggataacgccctccaatcgggtaactcccaggagagtgtcacagagcaggacagcaaggacagcacctacagcctcagcagcaccctgacgctgagcaaagcagactacgagaaacacaaagtctacgcctgcgaagtcacccatcagggcctgagctcgcccgtcacaaagagcttcaacaggggagagtgttagtaa

SEQ ID NO: 503 - protein, 220 aa, Artificial Sequence
  Humanized C3 Kappa light chain
DIVMTQTPLSLSVTPGQPASISCRSSQTIVHSNGNTYLEWYLQKPGQSPQLLIYKVSNRFSGVPDRFSGSGSGTDFTLKISRVEAEDVGVYYCFQGSHVPFTFGGGTKVEIKRTTVAAPSVFIFPPSDEQLKSGTASVVCLLNNFYPREAKVQWKVDNALQSGNSQESVTEQDSKDSTYSLSSTLTLSKADYEKHKVYACEVTHQGLSSPVTKSFNRGEC

SEQ ID NO: 504 - skipped

SEQ ID NO: 505 - DNA, 321 bp, Artificial Sequence
  Mouse C8 heavy chain variable region sequence
gaagtgatggtcgtggaaagcggcggtggtctggtaaagccggggggatcccttaagctttcttgcgccgcatccgggttcacgttctccggctatgccatgtcctgggtccgacagactcccgaaaagcgcttggaatgggtggccactatctcctccggggggacgtacatctactaccccgacagtgtgaaaggaagatttacaatatctcgcgacaacgcaaaaaataccttgtatcttcaaatgagctccctgcggtcagaggacactgccatgtactattgcgcccgcctgggcggcgacaattactatgagtat

SEQ ID NO: 506 - protein, 107 aa, Artificial Sequence
  Mouse C8 heavy chain variable region sequence
EVMVVESGGGLVKPGGSLKLSCAASGFTFSGYAMSWVRQTPEKRLEWVATISSGGTYIYYPDSVKGRFTISRDNAKNTLYLQMSSLRSEDTAMYYCARLGGDNYYEY

SEQ ID NO: 507 - DNA, 15 bp, Artificial Sequence
  Mouse C8 heavy chain variable complementarity determining region 1 (CDR1) sequence
ggctatgccatgtcc

SEQ ID NO: 508 - protein, 5 aa, Artificial Sequence
  Mouse C8 heavy chain variable complementarity determining region 1 (CDR1) sequence
GYAMS

SEQ ID NO: 509 - DNA, 51 bp, Artificial Sequence
  Mouse C8 heavy chain variable complementarity determining region 2 (CDR2) sequence
actatctcctccggggggacgtacatctactaccccgacagtgtgaaagga

SEQ ID NO: 510 - protein, 17 aa, Artificial Sequence
  Mouse C8 heavy chain variable complementarity determining region 2 (CDR2) sequence
TISSGGTYIYYPDSVKG

SEQ ID NO: 511 - DNA, 27 bp, Artificial Sequence
  Mouse C8 heavy chain variable complementarity determining region 3 (CDR3) sequence
ctgggcggcgacaattactatgagtat

SEQ ID NO: 512 - protein, 9 aa, Artificial Sequence
  Mouse C8 heavy chain variable complementarity determining region 3 (CDR3) sequence
LGGDNYYEY

SEQ ID NO: 513-524 - skipped (12 entries)

SEQ ID NO: 525 - DNA, 354 bp, Artificial Sequence
  Humanized C8 heavy chain variable region sequence from IGHV321*04
gaggtgcagctggtggagtctgggggaggcctggtcaagcctggggggtccctgagactctcctgtgcagcctctggattcaccttcagtggctatgccatgagctgggtccgccaggctccagggaaggggctggagtgggtctcaaccattagtagtggcggaacctacatatactaccctgactcagtgaagggccgattcaccatctccagagacaacgccaagaactcactgtatctgcaaatgaacagcctgagagccgaggacacggccgtgtattactgtgcgagactgggcggcgataactattatgaatattggggcaaagggaccacggtcaccgtctcctcc

SEQ ID NO: 526 - protein, 118 aa, Artificial Sequence
  Humanized C8 heavy chain variable region sequence from IGHV321*04
EVQLVESGGGLVKPGGSLRLSCAASGFTFSGYAMSWVRQAPGKGLEWVSTISSGGTYIYYPDSVKGRFTISRDNAKNSLYLQMNSLRAEDTAVYYCARLGGDNYYEYWGKGTTVTVSS

SEQ ID NO: 527 - DNA, 90 bp, Artificial Sequence; identical to SEQ ID NO: 40
  Humanized C8 heavy chain variable framework region 1 (FWR1) sequence

SEQ ID NO: 528 - protein, 30 aa, Artificial Sequence; identical to SEQ ID NO: 41
  Humanized C8 heavy chain variable framework region 1 (FWR1) sequence

SEQ ID NO: 529 - DNA, 15 bp, Artificial Sequence
  Humanized C8 heavy chain variable complementarity determining region 1 (CDR1) sequence
ggctatgccatgagc

SEQ ID NO: 530 - protein, 5 aa, Artificial Sequence
  Humanized C8 heavy chain variable complementarity determining region 1 (CDR1) sequence
GYAMS

SEQ ID NO: 531 - DNA, 42 bp, Artificial Sequence
  Humanized C8 heavy chain variable framework region 2 (FWR2) sequence
tgggtccgccaggctccagggaaggggctggagtgggtctca

SEQ ID NO: 532 - protein, 14 aa, Artificial Sequence
  Humanized C8 heavy chain variable framework region 2 (FWR2) sequence
WVRQAPGKGLEWVS

SEQ ID NO: 533 - DNA, 51 bp, Artificial Sequence
  Humanized C8 heavy chain variable complementarity determining region 2 (CDR2) sequence
accattagtagtggcggaacctacatatactaccctgactcagtgaagggc

SEQ ID NO: 534 - protein, 17 aa, Artificial Sequence
  Humanized C8 heavy chain variable complementarity determining region 2 (CDR2) sequence
TISSGGTYIYYPDSVKG

SEQ ID NO: 535 - DNA, 96 bp, Artificial Sequence; identical to SEQ ID NO: 154
  Humanized C8 heavy chain variable framework region 3 (FWR3) sequence

SEQ ID NO: 536 - protein, 32 aa, Artificial Sequence; identical to SEQ ID NO: 155
  Humanized C8 heavy chain variable framework region 3 (FWR3) sequence

SEQ ID NO: 537 - DNA, 27 bp, Artificial Sequence
  Humanized C8 heavy chain variable complementarity determining region 3 (CDR3) sequence
ctgggcggcgataactattatgaatat

SEQ ID NO: 538 - protein, 9 aa, Artificial Sequence
  Humanized C8 heavy chain variable complementarity determining region 3 (CDR3) sequence
LGGDNYYEY

SEQ ID NO: 539 - DNA, 1350 bp, Artificial Sequence
  Humanized C8 IgG1 heavy chain sequence
gaggtgcagctggtggagtctgggggaggcctggtcaagcctggggggtccctgagactctcctgtgcagcctctggattcaccttcagtggctatgccatgagctgggtccgccaggctccagggaaggggctggagtgggtctcaaccattagtagtggcggaacctacatatactaccctgactcagtgaagggccgattcaccatctccagagacaacgccaagaactcactgtatctgcaaatgaacagcctgagagccgaggacacggccgtgtattactgtgcgagactgggcggcgataactattatgaatattggggcaaagggaccacggtcaccgtctcctccgctagcaccaagggcccatcggtcttccccctggcaccctcctccaagagcacctctgggggcacagcggccctgggctgcctggtcaaggactacttccccgaaccggtgacggtgtcgtggaactcaggcgccctgaccagcggcgtgcacaccttcccggctgtcctacagtcctcaggactctactccctcagcagcgtggtgacagtgccctccagcagcttgggcacccagacctacatctgcaacgtgaatcacaagcccagcaacaccaaggtggacaagaaagttgagcccaaatcttgtgacaaaactcacacatgcccaccgtgcccagcacctgaactcctggggggaccgtcagtcttcctcttccccccaaaacccaaggacaccctcatgatctcccggacccctgaggtcacatgcgtggtggtggacgtgagccacgaagaccctgaggtcaagttcaactggtacgtggacggcgtggaggtgcataatgccaagacaaagccgcgggaggagcagtacaacagcacgtaccgtgtggtcagcgtcctcaccgtcctgcaccaggactggctgaatggcaaggagtacaagtgcaaggtctccaacaaagccctcccagcccccatcgagaaaaccatctccaaagccaaagggcagccccgagaaccacaggtgtacaccctgcccccatcccgggaggagatgaccaagaaccaggtcagcctgacctgcctggtcaaaggcttctatcccagcgacatcgccgtggagtgggagagcaatgggcagccggagaacaactacaagaccacgcctcccgtgctggactccgacggctccttcttcctctacagcaagctcaccgtggacaagagcaggtggcagcaggggaacgtcttctcatgctccgtgatgcatgaggctctgcacaaccactacacgcagaagagcctctccctgtctccgggtaaatgataa

SEQ ID NO: 540 - protein, 448 aa, Artificial Sequence
  Humanized C8 IgG1 heavy chain sequence
EVQLVESGGGLVKPGGSLRLSCAASGFTFSGYAMSWVRQAPGKGLEWVSTISSGGTYIYYPDSVKGRFTISRDNAKNSLYLQMNSLRAEDTAVYYCARLGGDNYYEYWGKGTTVTVSSASTKGPSVFPLAPSSKSTSGGTAALGCLVKDYFPEPVTVSWNSGALTSGVHTFPAVLQSSGLYSLSSVVTVPSSSLGTQTYICNVNHKPSNTKVDKKVEPKSCDKTHTCPPCPAPELLGGPSVFLFPPKPKDTLMISRTPEVTCVVVDVSHEDPEVKFNWYVDGVEVHNAKTKPREEQYNSTYRVVSVLTVLHQDWLNGKEYKCKVSNKALPAPIEKTISKAKGQPREPQVYTLPPSREEMTKNQVSLTCLVKGFYPSDIAVEWESNGQPENNYKTTPPVLDSDGSFFLYSKLTVDKSRWQQGNVFSCSVMHEALHNHYTQKSLSLSPGK

SEQ ID NO: 541 - DNA, 1338 bp, Artificial Sequence
  Humanized C8 IgG2 heavy chain sequence
gaggtgcagctggtggagtctgggggaggcctggtcaagcctggggggtccctgagactctcctgtgcagcctctggattcaccttcagtggctatgccatgagctgggtccgccaggctccagggaaggggctggagtgggtctcaaccattagtagtggcggaacctacatatactaccctgactcagtgaagggccgattcaccatctccagagacaacgccaagaactcactgtatctgcaaatgaacagcctgagagccgaggacacggccgtgtattactgtgcgagactgggcggcgataactattatgaatattggggcaaagggaccacggtcaccgtctcctccgcctccaccaagggcccatcggtcttccccctggcgccctgctccaggagcacctccgagagcacagccgccctgggctgcctggtcaaggactacttccccgaaccggtgacggtgtcgtggaactcaggcgctctgaccagcggcgtgcacaccttcccagctgtcctacagtcctcaggactctactccctcagcagcgtggtgaccgtgccctccagcaacttcggcacccagacctacacctgcaacgtagatcacaagcccagcaacaccaaggtggacaagacagttgagcgcaaatgttgtgtcgagtgcccaccgtgcccagcaccacctgtggcaggaccgtcagtcttcctcttccccccaaaacccaaggacaccctcatgatctcccggacccctgaggtcacgtgcgtggtggtggacgtgagccacgaagaccccgaggtccagttcaactggtacgtggacggcgtggaggtgcataatgccaagacaaagccacgggaggagcagttcaacagcacgttccgtgtggtcagcgtcctcaccgttgtgcaccaggactggctgaacggcaaggagtacaagtgcaaggtctccaacaaaggcctcccagcccccatcgagaaaaccatctccaaaaccaaagggcagccccgagaaccacaggtgtacaccctgcccccatcccgggaggagatgaccaagaaccaggtcagcctgacctgcctggtcaaaggcttctaccccagcgacatcgccgtggagtgggagagcaatgggcagccggagaacaactacaagaccacacctcccatgctggactccgacggctccttcttcctctacagcaagctcaccgtggacaagagcaggtggcagcaggggaacgtcttctcatgctccgtgatgcatgaggctctgcacaaccactacacgcagaagagcctctccctgtctccgggtaaatagtaa

SEQ ID NO: 542 - protein, 444 aa, Artificial Sequence
  Humanized C8 IgG2 heavy chain sequence
EVQLVESGGGLVKPGGSLRLSCAASGFTFSGYAMSWVRQAPGKGLEWVSTISSGGTYIYYPDSVKGRFTISRDNAKNSLYLQMNSLRAEDTAVYYCARLGGDNYYEYWGKGTTVTVSSASTKGPSVFPLAPCSRSTSESTAALGCLVKDYFPEPVTVSWNSGALTSGVHTFPAVLQSSGLYSLSSVVTVPSSNFGTQTYTCNVDHKPSNTKVDKTVERKCCVECPPCPAPPVAGPSVFLFPPKPKDTLMISRTPEVTCVVVDVSHEDPEVQFNWYVDGVEVHNAKTKPREEQFNSTFRVVSVLTVVHQDWLNGKEYKCKVSNKGLPAPIEKTISKTKGQPREPQVYTLPPSREEMTKNQVSLTCLVKGFYPSDIAVEWESNGQPENNYKTTPPMLDSDGSFFLYSKLTVDKSRWQQGNVFSCSVMHEALHNHYTQKSLSLSPGK

SEQ ID NO: 543 - DNA, 306 bp, Artificial Sequence
  Mouse C8 light chain variable region sequence
gacatcgtcattacgcagacccctgccagtcttgccgtttctctgggccagagggccactatcagttacagggcgagtaagtctgtgagtaccagcggctatagttacatgcattggaaccagcagaaaccgggacagccaccacgcctgcttatttatctggtgtctaatcttgagtccggggtgcccgccaggttcagcggcagcggctctgggaccgacttcacactcaacattcatccagtggaagaagaggacgctgctacatactactgtcaacacattcgggaactgaccaggagtgaa

SEQ ID NO: 544 - protein, 102 aa, Artificial Sequence
  Mouse C8 light chain variable region sequence
DIVITQTPASLAVSLGQRATISYRASKSVSTSGYSYMHWNQQKPGQPPRLLIYLVSNLESGVPARFSGSGSGTDFTLNIHPVEEEDAATYYCQHIRELTRSE

SEQ ID NO: 545 - DNA, 45 bp, Artificial Sequence
  Mouse C8 light chain variable complementarity determining region 1 (CDR1) sequence
agggcgagtaagtctgtgagtaccagcggctatagttacatgcat

SEQ ID NO: 546 - protein, 15 aa, Artificial Sequence
  Mouse C8 light chain variable complementarity determining region 1 (CDR1) sequence
RASKSVSTSGYSYMH

SEQ ID NO: 547 - DNA, 21 bp, Artificial Sequence
  Mouse C8 light chain variable complementarity determining region 2 (CDR2) sequence
ctggtgtctaatcttgagtcc

SEQ ID NO: 548 - protein, 7 aa, Artificial Sequence
  Mouse C8 light chain variable complementarity determining region 2 (CDR2) sequence
LVSNLES

SEQ ID NO: 549 - DNA, 30 bp, Artificial Sequence
  Mouse C8 light chain variable complementarity determining region 3 (CDR3) sequence
caacacattcgggaactgaccaggagtgaa

SEQ ID NO: 550 - protein, 10 aa, Artificial Sequence
  Mouse C8 light chain variable complementarity determining region 3 (CDR3) sequence
QHIRELTRSE

SEQ ID NO: 551-564 - skipped (14 entries)

SEQ ID NO: 565 - DNA, 342 bp, Artificial Sequence
  Humanized C8 light chain variable region sequence from NCBI germline z00023
gacatcgtgatgacccagtctccagactccctggctgtgtctctgggcgagagggccaccatcaactgcagggccagcaagagtgttagcaccagcggctacagctacatgcactggtaccagcagaaaccaggacagcctcctaagctgctcatttacctggtgtctaacctggaatccggggtccctgaccgattcagtggcagcgggtctgggacagatttcactctcaccatcagcagcctgcaggctgaagatgtggcagtttattactgtcaacacattcgggaactgaccaggagtgaattcggcggagggaccaaggtggagatcaaacgaact

SEQ ID NO: 566 - protein, 114 aa, Artificial Sequence
  Humanized C8 light chain variable region sequence from NCBI germline z00023
DIVMTQSPDSLAVSLGERATINCRASKSVSTSGYSYMHWYQQKPGQPPKLLIYLVSNLESGVPDRFSGSGSGTDFTLTISSLQAEDVAVYYCQHIRELTRSEFGGGTKVEIKRT

SEQ ID NO: 567 - DNA, 69 bp, Artificial Sequence
  Humanized C8 light chain variable framework region 1 (FWR1) sequence
gacatcgtgatgacccagtctccagactccctggctgtgtctctgggcgagagggccaccatcaactgc

SEQ ID NO: 568 - protein, 23 aa, Artificial Sequence
  Humanized C8 light chain variable framework region 1 (FWR1) sequence
DIVMTQSPDSLAVSLGERATINC

SEQ ID NO: 569 - DNA, 42 bp, Artificial Sequence
  Humanized C8 light chain variable complementarity determining region 1 (CDR1) sequence
agggccagcaagagtgttagcaccagcggctacagctacatg

SEQ ID NO: 570 - protein, 14 aa, Artificial Sequence
  Humanized C8 light chain variable complementarity determining region 1 (CDR1) sequence
RASKSVSTSGYSYM

SEQ ID NO: 571 - DNA, 48 bp, Artificial Sequence
  Humanized C8 light chain variable framework region 2 (FWR2) sequence
cactggtaccagcagaaaccaggacagcctcctaagctgctcatttac

SEQ ID NO: 572 - protein, 16 aa, Artificial Sequence
  Humanized C8 light chain variable framework region 2 (FWR2) sequence
HWYQQKPGQPPKLLIY

SEQ ID NO: 573 - DNA, 21 bp, Artificial Sequence
  Humanized C8 light chain variable complementarity determining region 2 (CDR2) sequence
ctggtgtctaacctggaatcc

SEQ ID NO: 574 - protein, 7 aa, Artificial Sequence
  Humanized C8 light chain variable complementarity determining region 2 (CDR2) sequence
LVSNLES

SEQ ID NO: 575 - DNA, 96 bp, Artificial Sequence
  Humanized C8 light chain variable framework region 3 (FWR3) sequence
ggggtccctgaccgattcagtggcagcgggtctgggacagatttcactctcaccatcagcagcctgcaggctgaagatgtggcagtttattactgt

SEQ ID NO: 576 - protein, 32 aa, Artificial Sequence
  Humanized C8 light chain variable framework region 3 (FWR3) sequence
GVPDRFSGSGSGTDFTLTISSLQAEDVAVYYC

SEQ ID NO: 577 - DNA, 30 bp, Artificial Sequence; identical to SEQ ID NO: 549
  Humanized C8 light chain variable complementarity determining region 3 (CDR3) sequence

SEQ ID NO: 578 - protein, 10 aa, Artificial Sequence
  Humanized C8 light chain variable complementarity determining region 3 (CDR3) sequence
QHIRELTRSE

SEQ ID NO: 579 - DNA, 666 bp, Artificial Sequence
  Humanized C8 Lambda light chain sequence
gacatcgtgatgacccagtctccagactccctggctgtgtctctgggcgagagggccaccatcaactgcagggccagcaagagtgttagcaccagcggctacagctacatgcactggtaccagcagaaaccaggacagcctcctaagctgctcatttacctggtgtctaacctggaatccggggtccctgaccgattcagtggcagcgggtctgggacagatttcactctcaccatcagcagcctgcaggctgaagatgtggcagtttattactgtcaacacattcgggaactgaccaggagtgaattcggcggagggaccaaggtggagatcaaacgaactggtcagcccaaggctgccccctcggtcactctgttcccgccctcctctgaggagcttcaagccaacaaggccacactggtgtgtctcataagtgacttctacccgggagccgtgacagtggcctggaaggcagatagcagccccgtcaaggcgggagtggagaccaccacaccctccaaacaaagcaacaacaagtacgcggccagcagctatctgagcctgacgcctgagcagtggaagtcccacagaagctacagctgccaggtcacgcatgaagggagcaccgtggagaagacagtggcccctacagaatgttcatagtaa

SEQ ID NO: 580 - protein, 220 aa, Artificial Sequence
  Humanized C8 Lambda light chain sequence
DIVMTQSPDSLAVSLGERATINCRASKSVSTSGYSYMHWYQQKPGQPPKLLIYLVSNLESGVPDRFSGSGSGTDFTLTISSLQAEDVAVYYCQHIRELTRSEFGGGTKVEIKRTGQPKAAPSVTLFPPSSEELQANKATLVCLISDFYPGAVTVAWKADSSPVKAGVETTTPSKQSNNKYAASSYLSLTPEQWKSHRSYSCQVTHEGSTVEKTVAPTECS

SEQ ID NO: 581 - DNA, 666 bp, Artificial Sequence
  Humanized C8 Kappa light chain sequence
gacatcgtgatgacccagtctccagactccctggctgtgtctctgggcgagagggccaccatcaactgcagggccagcaagagtgttagcaccagcggctacagctacatgcactggtaccagcagaaaccaggacagcctcctaagctgctcatttacctggtgtctaacctggaatccggggtccctgaccgattcagtggcagcgggtctgggacagatttcactctcaccatcagcagcctgcaggctgaagatgtggcagtttattactgtcaacacattcgggaactgaccaggagtgaattcggcggagggaccaaggtggagatcaaacgaactacggtggctgcaccatctgtcttcatcttcccgccatctgatgagcagttgaaatctggaactgcctctgttgtgtgcctgctgaataacttctatcccagagaggccaaagtacagtggaaggtggataacgccctccaatcgggtaactcccaggagagtgtcacagagcaggacagcaaggacagcacctacagcctcagcagcaccctgacgctgagcaaagcagactacgagaaacacaaagtctacgcctgcgaagtcacccatcagggcctgagctcgcccgtcacaaagagcttcaacaggggagagtgttagtaa

SEQ ID NO: 582 - protein, 220 aa, Artificial Sequence
  Humanized C8 Kappa light chain sequence
DIVMTQSPDSLAVSLGERATINCRASKSVSTSGYSYMHWYQQKPGQPPKLLIYLVSNLESGVPDRFSGSGSGTDFTLTISSLQAEDVAVYYCQHIRELTRSEFGGGTKVEIKRTTVAAPSVFIFPPSDEQLKSGTASVVCLLNNFYPREAKVQWKVDNALQSGNSQESVTEQDSKDSTYSLSSTLTLSKADYEKHKVYACEVTHQGLSSPVTKSFNRGEC

SEQ ID NO: 583 - skipped

SEQ ID NO: 584 - DNA, 942 bp, Artificial Sequence
  CART E6 CD8 sequence
gaggtccagctggttgagagtggcggtgggctggttaagcctggcggctccctgcggctgagctgcgccgcgagtggatttactttcagccgatatgggatgagttgggtgcggcaagctcccgggaagaggctggaatgggtctcaacaatctccggggggggcacttacatctattaccccgactcagtcaaggggagatttaccatttcacgagacaacgctaagaataccctgtatttgcagatgaattctctgagagcagaggacacagctgtttactattgtacccgcgacaactatggcaggaactacgactacggtatggactattggggacaagggacattggttacagtgagcagtggcggcgggggcagcggaggaggaggcagcggtggggggggcagcgagatagtgctcacgcagtcacccgcgactctcagtctctcacctggggaacgagctaccctgacgtgctctgctacctcctcagtgtcatatattcactggtatcagcaacggcccgggcagtcccctagattgctcatttatagtacctctaatctggcctcaggtatccctgcacgattttctggatctggttcaggttctgattacaccctcactatctctagcctggagcctgaagactttgccgtttattactgccagcagaggtctagctccccattcacctttgggagtgggaccaaggttgaaattaaaacgacaaccccggcccccagaccaccaacgccagcccccaccatcgccagccaacccctgtctctgagaccagaagcctgtaggcctgccgccggtggagctgtgcacacaagaggactggatttcgcctgtgatatctacatttgggccccgctcgcaggcacatgtggagtgctcctcctctccctggtgattaccctgtactgctgataa

SEQ ID NO: 585 - protein, 312 aa, Artificial Sequence
  CART E6 CD8 sequence
EVQLVESGGGLVKPGGSLRLSCAASGFTFSRYGMSWVRQAPGKRLEWVSTISGGGTYIYYPDSVKGRFTISRDNAKNTLYLQMNSLRAEDTAVYYCTRDNYGRNYDYGMDYWGQGTLVTVSSGGGGSGGGGSGGGGSEIVLTQSPATLSLSPGERATLTCSATSSVSYIHWYQQRPGQSPRLLIYSTSNLASGIPARFSGSGSGSDYTLTISSLEPEDFAVYYCQQRSSSPFTFGSGTKVEIKTTTPAPRPPTPAPTIASQPLSLRPEACRPAAGGAVHTRGLDFACDIYIWAPLAGTCGVLLLSLVITLYC

SEQ ID NO: 586 - DNA, 960 bp, Artificial Sequence
  CART C2 CD8 CD8 sequence - NCD8lshuMNC2scFvCD8ecd fragment CD8 transmembraneC
gaagtgcagctcgtagagagtggcgggggactggtgaagcccggtggaagcctcagactcagttgcgccgcctcaggtttcactttttcaggttacgccatgtcctgggtaagacaggcaccggggaaaggactcgagtgggtgtctactatcagctcaggaggcacttatatatattatcctgactctgtaaaaggccgatttacgatttctcgcgacaatgcaaagaactccctctacctccaaatgaacagtcttagggcagaagacactgctgtatactattgtgcacgcctcggcggcgacaactactacgagtactttgacgtgtgggggaaagggactaccgtgacagtttcaagcggaggaggtggctcaggtggaggcgggtcaggggggggaggaagtgatattgtgctcacacaatccccagcctccctggctgtgtctcccggccaacgcgctacaattacatgtcgggcctccaaaagcgtgagcaccagcggctacagctacatgcactggtatcaacagaaaccaggacaaccccccaaactgttgatttatctcgcttcaaacttggagtccggcgtgcctgcgcgcttttcagggagtgggagcggcacagattttacgctgactatcaaccccgtagaagcaaacgatacagcgaattattattgtcaacattcccgggaactcccctttacgttcggcgggggcacaaaggtcgaaattaagagaaccacgacaaccccggcccccagaccaccaacgccagcccccaccatcgccagccaacccctgtctctgagaccagaagcctgtaggcctgccgccggtggagctgtgcacacaagaggactggatttcgcctgtgatatctacatttgggccccgctcgcaggcacatgtggagtgctcctcctctccctggtgattaccctgtactgctgataa

SEQ ID NO: 587 - protein, 318 aa, Artificial Sequence
  CART C2 CD8 CD8 sequence - NCD8lshuMNC2scFvCD8ecd fragment CD8 transmembraneC
EVQLVESGGGLVKPGGSLRLSCAASGFTFSGYAMSWVRQAPGKGLEWVSTISSGGTYIYYPDSVKGRFTISRDNAKNSLYLQMNSLRAEDTAVYYCARLGGDNYYEYFDVWGKGTTVTVSSGGGGSGGGGSGGGGSDIVLTQSPASLAVSPGQRATITCRASKSVSTSGYSYMHWYQQKPGQPPKLLIYLASNLESGVPARFSGSGSGTDFTLTINPVEANDTANYYCQHSRELPFTFGGGTKVEIKRTTTTPAPRPPTPAPTIASQPLSLRPEACRPAAGGAVHTRGLDFACDIYIWAPLAGTCGVLLLSLVITLYC

SEQ ID NO: 588 - DNA, 339 bp, Artificial Sequence
  CD8/41BB sequence - N CD8 transmembrane 41BBC
acgacaaccccggcccccagaccaccaacgccagcccccaccatcgccagccaacccctgtctctgagaccagaagcctgtaggcctgccgccggtggagctgtgcacacaagaggactggatttcgcctgtgatatctacatttgggccccgctcgcaggcacatgtggagtgctcctcctctccctggtgattaccctgtactgcaaaaggggccgcaaaaaactcctttacatttttaagcagccttttatgaggccagtacagacgactcaagaggaagacgggtgctcatgccgctttcctgaggaggaggaaggagggtgcgaactgtgataa

SEQ ID NO: 589 - protein, 111 aa, Artificial Sequence
  CD8/41BB sequence - N CD8 transmembrane 41BBC
TTTPAPRPPTPAPTIASQPLSLRPEACRPAAGGAVHTRGLDFACDIYIWAPLAGTCGVLLLSLVITLYCKRGRKKLLYIFKQPFMRPVQTTQEEDGCSCRFPEEEEGGCEL

SEQ ID NO: 590 - DNA, 336 bp, Artificial Sequence
  CD8/CD28 sequence - N CD8 transmembrane CD28C
acgacaaccccggcccccagaccaccaacgccagcccccaccatcgccagccaacccctgtctctgagaccagaagcctgtaggcctgccgccggtggagctgtgcacacaagaggactggatttcgcctgtgatatctacatttgggccccgctcgcaggcacatgtggagtgctcctcctctccctggtgattaccctgtactgcagaagcaagcggtctcggctcctgcattctgattacatgaacatgaccccaagaagaccaggccccaccaggaaacattaccagccctacgctccgccacgcgacttcgctgcctaccggtcctgataa

SEQ ID NO: 591 - protein, 110 aa, Artificial Sequence
  CD8/CD28 sequence - N CD8 transmembrane CD28C
TTTPAPRPPTPAPTIASQPLSLRPEACRPAAGGAVHTRGLDFACDIYIWAPLAGTCGVLLLSLVITLYCRSKRSRLLHSDYMNMTPRRPGPTRKHYQPYAPPRDFAAYRS

SEQ ID NO: 592 - DNA, 549 bp, Artificial Sequence
  CD8/CD3z sequence - N CD8 transmembrane CD3zetaC
acgacaaccccggcccccagaccaccaacgccagcccccaccatcgccagccaacccctgtctctgagaccagaagcctgtaggcctgccgccggtggagctgtgcacacaagaggactggatttcgcctgtgatatctacatttgggccccgctcgcaggcacatgtggagtgctcctcctctccctggtgattaccctgtactgccgcgttaagttctcccgatcagccgacgcgcctgcttacaagcagggccagaaccaactgtacaacgagctgaatctcggtagacgggaagagtacgacgtgttggacaaacggagaggccgcgacccagaaatgggcggcaagcctcgcaggaaaaacccccaggagggactgtacaatgagttgcagaaagataagatggcagaagcttatagcgagatcggaatgaagggggaaaggagacgagggaaaggacacgacggcctttatcagggcctgtccacagcaacaaaagatacgtatgacgccctccatatgcaggcacttccaccacggtgataa

SEQ ID NO: 593 - protein, 181 aa, Artificial Sequence
  CD8/CD3z sequence - N CD8 transmembrane CD3zetaC
TTTPAPRPPTPAPTIASQPLSLRPEACRPAAGGAVHTRGLDFACDIYIWAPLAGTCGVLLLSLVITLYCRVKFSRSADAPAYKQGQNQLYNELNLGRREEYDVLDKRRGRDPEMGGKPRRKNPQEGLYNELQKDKMAEAYSEIGMKGERRRGKGHDGLYQGLSTATKDTYDALHMQALPPR

SEQ ID NO: 594 - DNA, 672 bp, Artificial Sequence
  CD8/CD28/CD3z sequence - N CD8 transmembrane CD28 CD3zetaC
acgacaaccccggcccccagaccaccaacgccagcccccaccatcgccagccaacccctgtctctgagaccagaagcctgtaggcctgccgccggtggagctgtgcacacaagaggactggatttcgcctgtgatatctacatttgggccccgctcgcaggcacatgtggagtgctcctcctctccctggtgattaccctgtactgcagaagcaagcggtctcggctcctgcattctgattacatgaacatgaccccaagaagaccaggccccaccaggaaacattaccagccctacgctccgccacgcgacttcgctgcctaccggtcccgcgttaagttctcccgatcagccgacgcgcctgcttacaagcagggccagaaccaactgtacaacgagctgaatctcggtagacgggaagagtacgacgtgttggacaaacggagaggccgcgacccagaaatgggcggcaagcctcgcaggaaaaacccccaggagggactgtacaatgagttgcagaaagataagatggcagaagcttatagcgagatcggaatgaagggggaaaggagacgagggaaaggacacgacggcctttatcagggcctgtccacagcaacaaaagatacgtatgacgccctccatatgcaggcacttccaccacggtgataa

SEQ ID NO: 595 - protein, 222 aa, Artificial Sequence
  CD8/CD28/CD3z sequence - N CD8 transmembrane CD28 CD3zetaC
TTTPAPRPPTPAPTIASQPLSLRPEACRPAAGGAVHTRGLDFACDIYIWAPLAGTCGVLLLSLVITLYCRSKRSRLLHSDYMNMTPRRPGPTRKHYQPYAPPRDFAAYRSRVKFSRSADAPAYKQGQNQLYNELNLGRREEYDVLDKRRGRDPEMGGKPRRKNPQEGLYNELQKDKMAEAYSEIGMKGERRRGKGHDGLYQGLSTATKDTYDALHMQALPPR

SEQ ID NO: 596 - DNA, 675 bp, Artificial Sequence
  CD8/41BB/CD3z sequence - N CD8 transmembrane 41BB CD3zetaC
acgacaaccccggcccccagaccaccaacgccagcccccaccatcgccagccaacccctgtctctgagaccagaagcctgtaggcctgccgccggtggagctgtgcacacaagaggactggatttcgcctgtgatatctacatttgggccccgctcgcaggcacatgtggagtgctcctcctctccctggtgattaccctgtactgcaaaaggggccgcaaaaaactcctttacatttttaagcagccttttatgaggccagtacagacgactcaagaggaagacgggtgctcatgccgctttcctgaggaggaggaaggagggtgcgaactgcgcgttaagttctcccgatcagccgacgcgcctgcttacaagcagggccagaaccaactgtacaacgagctgaatctcggtagacgggaagagtacgacgtgttggacaaacggagaggccgcgacccagaaatgggcggcaagcctcgcaggaaaaacccccaggagggactgtacaatgagttgcagaaagataagatggcagaagcttatagcgagatcggaatgaagggggaaaggagacgagggaaaggacacgacggcctttatcagggcctgtccacagcaacaaaagatacgtatgacgccctccatatgcaggcacttccaccacggtgataa

SEQ ID NO: 597 - protein, 223 aa, Artificial Sequence
  CD8/41BB/CD3z sequence - N CD8 transmembrane 41BB CD3zetaC
TTTPAPRPPTPAPTIASQPLSLRPEACRPAAGGAVHTRGLDFACDIYIWAPLAGTCGVLLLSLVITLYCKRGRKKLLYIFKQPFMRPVQTTQEEDGCSCRFPEEEEGGCELRVKFSRSADAPAYKQGQNQLYNELNLGRREEYDVLDKRRGRDPEMGGKPRRKNPQEGLYNELQKDKMAEAYSEIGMKGERRRGKGHDGLYQGLSTATKDTYDALHMQALPPR

SEQ ID NO: 598 - DNA, 798 bp, Artificial Sequence
  CD8/CD28/41BB/CD3z sequence - N CD8 transmembrane CD28 41BB CD3zetaC
acgacaaccccggcccccagaccaccaacgccagcccccaccatcgccagccaacccctgtctctgagaccagaagcctgtaggcctgccgccggtggagctgtgcacacaagaggactggatttcgcctgtgatatctacatttgggccccgctcgcaggcacatgtggagtgctcctcctctccctggtgattaccctgtactgcagaagcaagcggtctcggctcctgcattctgattacatgaacatgaccccaagaagaccaggccccaccaggaaacattaccagccctacgctccgccacgcgacttcgctgcctaccggtccaaaaggggccgcaaaaaactcctttacatttttaagcagccttttatgaggccagtacagacgactcaagaggaagacgggtgctcatgccgctttcctgaggaggaggaaggagggtgcgaactgcgcgttaagttctcccgatcagccgacgcgcctgcttacaagcagggccagaaccaactgtacaacgagctgaatctcggtagacgggaagagtacgacgtgttggacaaacggagaggccgcgacccagaaatgggcggcaagcctcgcaggaaaaacccccaggagggactgtacaatgagttgcagaaagataagatggcagaagcttatagcgagatcggaatgaagggggaaaggagacgagggaaaggacacgacggcctttatcagggcctgtccacagcaacaaaagatacgtatgacgccctccatatgcaggcacttccaccacggtgataa

SEQ ID NO: 599 - protein, 264 aa, Artificial Sequence
  CD8/CD28/41BB/CD3z sequence - N CD8 transmembrane CD28 41BB CD3zetaC
TTTPAPRPPTPAPTIASQPLSLRPEACRPAAGGAVHTRGLDFACDIYIWAPLAGTCGVLLLSLVITLYCRSKRSRLLHSDYMNMTPRRPGPTRKHYQPYAPPRDFAAYRSKRGRKKLLYIFKQPFMRPVQTTQEEDGCSCRFPEEEEGGCELRVKFSRSADAPAYKQGQNQLYNELNLGRREEYDVLDKRRGRDPEMGGKPRRKNPQEGLYNELQKDKMAEAYSEIGMKGERRRGKGHDGLYQGLSTATKDTYDALHMQALPPR

SEQ ID NO: 600-607 - skipped (8 entries)

SEQ ID NO: 608 - DNA, 1482 bp, Artificial Sequence
  CART C2 CD8/CD8/CD28/CD3z sequence - NCD8lshuMNC2scFvCD8ecd fragment CD8 transmembrane CD28 CD3zetaC
atggccttgccagtgacggccctgctgctgccattggctcttctgttgcacgctgccaggcctgaagtgcagctcgtagagagtggcgggggactggtgaagcccggtggaagcctcagactcagttgcgccgcctcaggtttcactttttcaggttacgccatgtcctgggtaagacaggcaccggggaaaggactcgagtgggtgtctactatcagctcaggaggcacttatatatattatcctgactctgtaaaaggccgatttacgatttctcgcgacaatgcaaagaactccctctacctccaaatgaacagtcttagggcagaagacactgctgtatactattgtgcacgcctcggcggcgacaactactacgagtactttgacgtgtgggggaaagggactaccgtgacagtttcaagcggaggaggtggctcaggtggaggcgggtcaggggggggaggaagtgatattgtgctcacacaatccccagcctccctggctgtgtctcccggccaacgcgctacaattacatgtcgggcctccaaaagcgtgagcaccagcggctacagctacatgcactggtatcaacagaaaccaggacaaccccccaaactgttgatttatctcgcttcaaacttggagtccggcgtgcctgcgcgcttttcagggagtgggagcggcacagattttacgctgactatcaaccccgtagaagcaaacgatacagcgaattattattgtcaacattcccgggaactcccctttacgttcggcgggggcacaaaggtcgaaattaagagaaccacgacaaccccggcccccagaccaccaacgccagcccccaccatcgccagccaacccctgtctctgagaccagaagcctgtaggcctgccgccggtggagctgtgcacacaagaggactggatttcgcctgtgatatctacatttgggccccgctcgcaggcacatgtggagtgctcctcctctccctggtgattaccctgtactgcagaagcaagcggtctcggctcctgcattctgattacatgaacatgaccccaagaagaccaggccccaccaggaaacattaccagccctacgctccgccacgcgacttcgctgcctaccggtcccgcgttaagttctcccgatcagccgacgcgcctgcttacaagcagggccagaaccaactgtacaacgagctgaatctcggtagacgggaagagtacgacgtgttggacaaacggagaggccgcgacccagaaatgggcggcaagcctcgcaggaaaaacccccaggagggactgtacaatgagttgcagaaagataagatggcagaagcttatagcgagatcggaatgaagggggaaaggagacgagggaaaggacacgacggcctttatcagggcctgtccacagcaacaaaagatacgtatgacgccctccatatgcaggcacttccaccacggtgataa

SEQ ID NO: 609 - protein, 492 aa, Artificial Sequence
  CART C2 CD8/CD8/CD28/CD3z sequence - NCD8lshuMNC2scFvCD8ecd fragment CD8 transmembrane CD28 CD3zetaC
MALPVTALLLPLALLLHAARPEVQLVESGGGLVKPGGSLRLSCAASGFTFSGYAMSWVRQAPGKGLEWVSTISSGGTYIYYPDSVKGRFTISRDNAKNSLYLQMNSLRAEDTAVYYCARLGGDNYYEYFDVWGKGTTVTVSSGGGGSGGGGSGGGGSDIVLTQSPASLAVSPGQRATITCRASKSVSTSGYSYMHWYQQKPGQPPKLLIYLASNLESGVPARFSGSGSGTDFTLTINPVEANDTANYYCQHSRELPFTFGGGTKVEIKRTTTTPAPRPPTPAPTIASQPLSLRPEACRPAAGGAVHTRGLDFACDIYIWAPLAGTCGVLLLSLVITLYCRSKRSRLLHSDYMNMTPRRPGPTRKHYQPYAPPRDFAAYRSRVKFSRSADAPAYKQGQNQLYNELNLGRREEYDVLDKRRGRDPEMGGKPRRKNPQEGLYNELQKDKMAEAYSEIGMKGERRRGKGHDGLYQGLSTATKDTYDALHMQALPPR

SEQ ID NO: 610 - DNA, 1485 bp, Artificial Sequence
  CART C2 CD8/CD8/41BB/CD3z sequence #13 - NCD8lshuMNC2scFvCD8ecd fragment CD8 transmembrane 41BB CD3zetaC
atggccttgccagtgacggccctgctgctgccattggctcttctgttgcacgctgccaggcctgaagtgcagctcgtagagagtggcgggggactggtgaagcccggtggaagcctcagactcagttgcgccgcctcaggtttcactttttcaggttacgccatgtcctgggtaagacaggcaccggggaaaggactcgagtgggtgtctactatcagctcaggaggcacttatatatattatcctgactctgtaaaaggccgatttacgatttctcgcgacaatgcaaagaactccctctacctccaaatgaacagtcttagggcagaagacactgctgtatactattgtgcacgcctcggcggcgacaactactacgagtactttgacgtgtgggggaaagggactaccgtgacagtttcaagcggaggaggtggctcaggtggaggcgggtcaggggggggaggaagtgatattgtgctcacacaatccccagcctccctggctgtgtctcccggccaacgcgctacaattacatgtcgggcctccaaaagcgtgagcaccagcggctacagctacatgcactggtatcaacagaaaccaggacaaccccccaaactgttgatttatctcgcttcaaacttggagtccggcgtgcctgcgcgcttttcagggagtgggagcggcacagattttacgctgactatcaaccccgtagaagcaaacgatacagcgaattattattgtcaacattcccgggaactcccctttacgttcggcgggggcacaaaggtcgaaattaagagaaccacgacaaccccggcccccagaccaccaacgccagcccccaccatcgccagccaacccctgtctctgagaccagaagcctgtaggcctgccgccggtggagctgtgcacacaagaggactggatttcgcctgtgatatctacatttgggccccgctcgcaggcacatgtggagtgctcctcctctccctggtgattaccctgtactgcaaaaggggccgcaaaaaactcctttacatttttaagcagccttttatgaggccagtacagacgactcaagaggaagacgggtgctcatgccgctttcctgaggaggaggaaggagggtgcgaactgcgcgttaagttctcccgatcagccgacgcgcctgcttacaagcagggccagaaccaactgtacaacgagctgaatctcggtagacgggaagagtacgacgtgttggacaaacggagaggccgcgacccagaaatgggcggcaagcctcgcaggaaaaacccccaggagggactgtacaatgagttgcagaaagataagatggcagaagcttatagcgagatcggaatgaagggggaaaggagacgagggaaaggacacgacggcctttatcagggcctgtccacagcaacaaaagatacgtatgacgccctccatatgcaggcacttccaccacggtgataa

SEQ ID NO: 611 - protein, 493 aa, Artificial Sequence
  CART C2 CD8/CD8/41BB/CD3z sequence #13 - NCD8lshuMNC2scFvCD8ecd fragment CD8 transmembrane 41BB CD3zetaC
MALPVTALLLPLALLLHAARPEVQLVESGGGLVKPGGSLRLSCAASGFTFSGYAMSWVRQAPGKGLEWVSTISSGGTYIYYPDSVKGRFTISRDNAKNSLYLQMNSLRAEDTAVYYCARLGGDNYYEYFDVWGKGTTVTVSSGGGGSGGGGSGGGGSDIVLTQSPASLAVSPGQRATITCRASKSVSTSGYSYMHWYQQKPGQPPKLLIYLASNLESGVPARFSGSGSGTDFTLTINPVEANDTANYYCQHSRELPFTFGGGTKVEIKRTTTTPAPRPPTPAPTIASQPLSLRPEACRPAAGGAVHTRGLDFACDIYIWAPLAGTCGVLLLSLVITLYCKRGRKKLLYIFKQPFMRPVQTTQEEDGCSCRFPEEEEGGCELRVKFSRSADAPAYKQGQNQLYNELNLGRREEYDVLDKRRGRDPEMGGKPRRKNPQEGLYNELQKDKMAEAYSEIGMKGERRRGKGHDGLYQGLSTATKDTYDALHMQALPPR

SEQ ID NO: 612-619 - skipped (8 entries)

SEQ ID NO: 620 - protein, 43 aa, Artificial Sequence
  MUC1 truncated extra cellular domain sequence
SNIKFRPGSVVVQLTLAFREGTINVHDVETQFNQYKTEAASRY

SEQ ID NO: 621 - protein, 35 aa, Artificial Sequence
  MUC1 truncated extra cellular domain sequence
SVVVQLTLAFREGTINVHDVETQFNQYKTEAASRY

SEQ ID NO: 622 - protein, 24 aa, Artificial Sequence
  MUC1 truncated extra cellular domain sequence
VQLTLAFREGTINVHDVETQFNQY

SEQ ID NO: 623 - protein, 24 aa, Artificial Sequence
  MUC1 truncated extra cellular domain sequence
SNIKFRPGSVVVQLTLAFREGTIN

SEQ ID NO: 624 - DNA, 28 bp, Artificial Sequence
  Primer
attctaagcttgggccaccatggaactg

SEQ ID NO: 625 - DNA, 41 bp, Artificial Sequence
  Primer
tctagagtttaaacttactatttacccggagacagggagag

SEQ ID NO: 626 - DNA, 41 bp, Artificial Sequence
  Primer
agtatggcccagccggccgaggtgcagctggtggagtctgg

SEQ ID NO: 627 - DNA, 26 bp, Artificial Sequence
  Primer
tagaaggcacagtcgaggctgatcag

SEQ ID NO: 628 - DNA, 27 bp, Artificial Sequence
  Primer
attctaagcttgggccaccatggaagc

SEQ ID NO: 629 - DNA, 40 bp, Artificial Sequence
  Primer
tctagagtttaaacttactaacactctcccctgttgaagc

SEQ ID NO: 630 - DNA, 43 bp, Artificial Sequence
  Primer
agtatggcccagccggccgaaattgtgttgacacagtctccag

SEQ ID NO: 631 - DNA, 26 bp, Artificial Sequence
  Primer
tagaaggcacagtcgaggctgatcag

SEQ ID NO: 632 - DNA, 33 bp, Artificial Sequence
  Primer
actgtcatatggaggtgcagctggtggagtctg

SEQ ID NO: 633 - DNA, 37 bp, Artificial Sequence
  Primer
actgtctcgagtttaatttccactttggtgccgctgc

SEQ ID NO: 634 - DNA, 33 bp, Artificial Sequence; identical to SEQ ID NO: 632
  Primer

SEQ ID NO: 635 - DNA, 37 bp, Artificial Sequence
  Primer
actgtaccggttttaatttccactttggtgccgctgc

SEQ ID NO: 636 - DNA, 29 bp, Artificial Sequence
  Primer
cttcttcctcaggagcaagctcaccgtgg

SEQ ID NO: 637 - DNA, 18 bp, Artificial Sequence
  Primer
gagccgtcggagtccagc

SEQ ID NO: 638 - DNA, 18 bp, Artificial Sequence
  Primer
gcacctgaactcctgggg

SEQ ID NO: 639 - DNA, 22 bp, Artificial Sequence
  Primer
tttaatttccactttggtgccg

SEQ ID NO: 640 - DNA, 32 bp, Artificial Sequence
  Primer
cgcggctagcttaagcttggtaccgagggcca

SEQ ID NO: 641 - DNA, 36 bp, Artificial Sequence
  Primer
cgcggcggccgcctgatcagcgggtttaaacttatc

SEQ ID NO: 642 - DNA, 2151 bp, Artificial Sequence
  MMP9 sequence
atgagcctctggcagcccctggtcctggtgctcctggtgctgggctgctgctttgctgcccccagacagcgccagtccacccttgtgctcttccctggagacctgagaaccaatctcaccgacaggcagctggcagaggaatacctgtaccgctatggttacactcgggtggcagagatgcgtggagagtcgaaatctctggggcctgcgctgctgcttctccagaagcaactgtccctgcccgagaccggtgagctggatagcgccacgctgaaggccatgcgaaccccacggtgcggggtcccagacctgggcagattccaaacctttgagggcgacctcaagtggcaccaccacaacatcacctattggatccaaaactactcggaagacttgccgcgggcggtgattgacgacgcctttgcccgcgccttcgcactgtggagcgcggtgacgccgctcaccttcactcgcgtgtacagccgggacgcagacatcgtcatccagtttggtgtcgcggagcacggagacgggtatcccttcgacgggaaggacgggctcctggcacacgcctttcctcctggccccggcattcagggagacgcccatttcgacgatgacgagttgtggtccctgggcaagggcgtcgtggttccaactcggtttggaaacgcagatggcgcggcctgccacttccccttcatcttcgagggccgctcctactctgcctgcaccaccgacggtcgctccgacggcttgccctggtgcagtaccacggccaactacgacaccgacgaccggtttggcttctgccccagcgagagactctacacccaggacggcaatgctgatgggaaaccctgccagtttccattcatcttccaaggccaatcctactccgcctgcaccacggacggtcgctccgacggctaccgctggtgcgccaccaccgccaactacgaccgggacaagctcttcggcttctgcccgacccgagctgactcgacggtgatggggggcaactcggcgggggagctgtgcgtcttccccttcactttcctgggtaaggagtactcgacctgtaccagcgagggccgcggagatgggcgcctctggtgcgctaccacctcgaactttgacagcgacaagaagtggggcttctgcccggaccaaggatacagtttgttcctcgtggcggcgcatgagttcggccacgcgctgggcttagatcattcctcagtgccggaggcgctcatgtaccctatgtaccgcttcactgaggggccccccttgcataaggacgacgtgaatggcatccggcacctctatggtcctcgccctgaacctgagccacggcctccaaccaccaccacaccgcagcccacggctcccccgacggtctgccccaccggaccccccactgtccacccctcagagcgccccacagctggccccacaggtcccccctcagctggccccacaggtccccccactgctggcccttctacggccactactgtgcctttgagtccggtggacgatgcctgcaacgtgaacatcttcgacgccatcgcggagattgggaaccagctgtatttgttcaaggatgggaagtactggcgattctctgagggcagggggagccggccgcagggccccttccttatcgccgacaagtggcccgcgctgccccgcaagctggactcggtctttgaggagcggctctccaagaagcttttcttcttctctgggcgccaggtgtgggtgtacacaggcgcgtcggtgctgggcccgaggcgtctggacaagctgggcctgggagccgacgtggcccaggtgaccggggccctccggagtggcagggggaagatgctgctgttcagcgggcggcgcctctggaggttcgacgtgaaggcgcagatggtggatccccggagcgccagcgaggtggaccggatgttccccggggtgcctttggacacgcacgacgtcttccagtaccgagagaaagcctatttctgccaggaccgcttctactggcgcgtgagttcccggagtgagttgaaccaggtggaccaagtgggctacgtgacctatgacatcctgcagtgccctgaggacgattacaaggatgacgacgataagtgataa

SEQ ID NO: 643 - protein, 715 aa, Artificial Sequence
  MMP9 sequence
MSLWQPLVLVLLVLGCCFAAPRQRQSTLVLFPGDLRTNLTDRQLAEEYLYRYGYTRVAEMRGESKSLGPALLLLQKQLSLPETGELDSATLKAMRTPRCGVPDLGRFQTFEGDLKWHHHNITYWIQNYSEDLPRAVIDDAFARAFALWSAVTPLTFTRVYSRDADIVIQFGVAEHGDGYPFDGKDGLLAHAFPPGPGIQGDAHFDDDELWSLGKGVVVPTRFGNADGAACHFPFIFEGRSYSACTTDGRSDGLPWCSTTANYDTDDRFGFCPSERLYTQDGNADGKPCQFPFIFQGQSYSACTTDGRSDGYRWCATTANYDRDKLFGFCPTRADSTVMGGNSAGELCVFPFTFLGKEYSTCTSEGRGDGRLWCATTSNFDSDKKWGFCPDQGYSLFLVAAHEFGHALGLDHSSVPEALMYPMYRFTEGPPLHKDDVNGIRHLYGPRPEPEPRPPTTTTPQPTAPPTVCPTGPPTVHPSERPTAGPTGPPSAGPTGPPTAGPSTATTVPLSPVDDACNVNIFDAIAEIGNQLYLFKDGKYWRFSEGRGSRPQGPFLIADKWPALPRKLDSVFEERLSKKLFFFSGRQVWVYTGASVLGPRRLDKLGLGADVAQVTGALRSGRGKMLLFSGRRLWRFDVKAQMVDPRSASEVDRMFPGVPLDTHDVFQYREKAYFCQDRFYWRVSSRSELNQVDQVGYVTYDILQCPEDDYKDDDDK

SEQ ID NO: 644 - DNA, 1062 bp, Artificial Sequence
  MMP9 catalytic domain
atgttccaaacctttgagggcgacctcaagtggcaccaccacaacatcacctattggatccaaaactactcggaagacttgccgcgggcggtgattgacgacgcctttgcccgcgccttcgcactgtggagcgcggtgacgccgctcaccttcactcgcgtgtacagccgggacgcagacatcgtcatccagtttggtgtcgcggagcacggagacgggtatcccttcgacgggaaggacgggctcctggcacacgcctttcctcctggccccggcattcagggagacgcccatttcgacgatgacgagttgtggtccctgggcaagggcgtcgtggttccaactcggtttggaaacgcagatggcgcggcctgccacttccccttcatcttcgagggccgctcctactctgcctgcaccaccgacggtcgctccgacggcttgccctggtgcagtaccacggccaactacgacaccgacgaccggtttggcttctgccccagcgagagactctacacccaggacggcaatgctgatgggaaaccctgccagtttccattcatcttccaaggccaatcctactccgcctgcaccacggacggtcgctccgacggctaccgctggtgcgccaccaccgccaactacgaccgggacaagctcttcggcttctgcccgacccgagctgactcgacggtgatggggggcaactcggcgggggagctgtgcgtcttccccttcactttcctgggtaaggagtactcgacctgtaccagcgagggccgcggagatgggcgcctctggtgcgctaccacctcgaactttgacagcgacaagaagtggggcttctgcccggaccaaggatacagtttgttcctcgtggcggcgcatgagttcggccacgcgctgggcttagatcattcctcagtgccggaggcgctcatgtaccctatgtaccgcttcactgaggggccccccttgcataaggacgacgtgaatggcatccggcacctctatggtcctcgccctgaacctgattacaaggatgacgacgataagtgataa

SEQ ID NO: 645 - protein, 352 aa, Artificial Sequence
  MMP9 catalytic domain
MFQTFEGDLKWHHHNITYWIQNYSEDLPRAVIDDAFARAFALWSAVTPLTFTRVYSRDADIVIQFGVAEHGDGYPFDGKDGLLAHAFPPGPGIQGDAHFDDDELWSLGKGVVVPTRFGNADGAACHFPFIFEGRSYSACTTDGRSDGLPWCSTTANYDTDDRFGFCPSERLYTQDGNADGKPCQFPFIFQGQSYSACTTDGRSDGYRWCATTANYDRDKLFGFCPTRADSTVMGGNSAGELCVFPFTFLGKEYSTCTSEGRGDGRLWCATTSNFDSDKKWGFCPDQGYSLFLVAAHEFGHALGLDHSSVPEALMYPMYRFTEGPPLHKDDVNGIRHLYGPRPEPDYKDDDDK

SEQ ID NO: 646 - DNA, 2186 bp, Artificial Sequence
  NFATc1 Promoter (NFATc1P)
aggcaggaggaagaggaaaggggcgcagggcgctcggggagcagagccgggggcccgcggtggccgcagaggccgggccggggcgcagaggccgggcgagctggccgcgctctgggccgccgcctccggaactccctgcgcctggcgcgcggccaccgtggtcccggcaacggcattaaacagagggaaacagacccgggattccgtcacccgggcggggggataaggacggctttgagagcagacaggaaaagggagcttttctgcatggggtgaaaaaattatttattgaaggaggaggaggcggcagcggaggaaggggaggggcgggaggaggaggaagagccggccgcccccgccccggccccggctcctcaggagccaagggcagcctcgccaggtcggtcccgggctcgaggaccgcggctggggtcgaggggctcagtctcccacgtgaccggctgggcgcgccccgccagacccggcctcgggattccctcctcccggcgagtctccgcccgccccgtcctggaggtggggagaaggagggcggggcgggggggacggaaactctccccgccaaatcctggccccaggcctggggacactcgcggcgggaagatttggaggggaggggagggggaggggcgtgggggcgcggcctcgctggagtccccctgaccccccgacccccgcccaccggcctgggcgtcctcccgcggcccctcctcccctcccggcgcccggtgctctggggcgcgtgccacgcctggctcggcgccgtaggggcccccgcaggtagagacccctggaaatggcctcgacgccgcaggagcgaggcggccaccaccccgctaatccgggcacgtctctccaggccgaggcctgcggtggaaaagccggggttccatttgtgctgagtcggggcggccgaatggagccaggcctcgggacgcgggacggacgggctctggccgcgcaccttcgcgggctctgcagcgcccgaccgcctcccccggcagggaggaggcgcttgtggggggcacccacggggcacagtgatccctgggggtctgcggacctcctgggccccgcagcagacacgagtttagcctttgggtttagtttaaatcacataagggtgtcgtgcaatcgatttatggtttctacacaccagacactttaacctccaaccccccccatccaagccaacaagaaaatgcggtgccgtgttggcagctgagctgcgcccgaagagacgcagggagacgtaagagaggaaagtgtgagtggccggggggcctccccccgtcagaagtcgcgcagtcgcgcccataaaacgccccctccgggcggctagggcaggtgagcgcgtccccgggcctccccacgccggcccctgccacagagccgtctaggtcgagcagatatttacagaataaaaatgacaataactcgacgtcccgggacggccacgcaatctgttagtaatttagcgggatgggaatttcctttctagggcctgccagtgaagcgcttttccaaatttccacagcgggggaagcctgcgattttacataatgacttcagcatgccgggctttctcgacacccctccccggcccccggcccccgccccccgccccttttccagcagggccgggctccctccggacacccgcgtggactcaggcgtcccgtctggcccgttcgcccccgtttcccccgccagccccagcgcccccctgcccggcccccggattccccgttcccgcccctacgcccccatcccctccccgtgcgcccctccccgtgcgcccccctccccgtgcgccccccctccccgtgcgcccccctccccgtgcgccccccctccccgggcgcccccctccccgggcgccccccctccccgtgcgcccccccctccccgtgcgccccccctccccgtgcgcgccccgcctcttgcgcccctgcccccaggcgagcggctgccgcggcgcggggaggggcgggcgctcggcgactcgtccccggggccccgcgcgggcccgggcagcaggggcgtgatgtcacggcagggagggggcgcgggagccgccgggccggcggggaggcgggggaggtgttttccagctttaaaaaggcaggaggcagagcgcggccctgcgtcagagcgagactcagagg

SEQ ID NO: 647 - DNA, 4349 bp, Artificial Sequence
  NFATc1PMMP9
aggcaggaggaagaggaaaggggcgcagggcgctcggggagcagagccgggggcccgcggtggccgcagaggccgggccggggcgcagaggccgggcgagctggccgcgctctgggccgccgcctccggaactccctgcgcctggcgcgcggccaccgtggtcccggcaacggcattaaacagagggaaacagacccgggattccgtcacccgggcggggggataaggacggctttgagagcagacaggaaaagggagcttttctgcatggggtgaaaaaattatttattgaaggaggaggaggcggcagcggaggaaggggaggggcgggaggaggaggaagagccggccgcccccgccccggccccggctcctcaggagccaagggcagcctcgccaggtcggtcccgggctcgaggaccgcggctggggtcgaggggctcagtctcccacgtgaccggctgggcgcgccccgccagacccggcctcgggattccctcctcccggcgagtctccgcccgccccgtcctggaggtggggagaaggagggcggggcgggggggacggaaactctccccgccaaatcctggccccaggcctggggacactcgcggcgggaagatttggaggggaggggagggggaggggcgtgggggcgcggcctcgctggagtccccctgaccccccgacccccgcccaccggcctgggcgtcctcccgcggcccctcctcccctcccggcgcccggtgctctggggcgcgtgccacgcctggctcggcgccgtaggggcccccgcaggtagagacccctggaaatggcctcgacgccgcaggagcgaggcggccaccaccccgctaatccgggcacgtctctccaggccgaggcctgcggtggaaaagccggggttccatttgtgctgagtcggggcggccgaatggagccaggcctcgggacgcgggacggacgggctctggccgcgcaccttcgcgggctctgcagcgcccgaccgcctcccccggcagggaggaggcgcttgtggggggcacccacggggcacagtgatccctgggggtctgcggacctcctgggccccgcagcagacacgagtttagcctttgggtttagtttaaatcacataagggtgtcgtgcaatcgatttatggtttctacacaccagacactttaacctccaaccccccccatccaagccaacaagaaaatgcggtgccgtgttggcagctgagctgcgcccgaagagacgcagggagacgtaagagaggaaagtgtgagtggccggggggcctccccccgtcagaagtcgcgcagtcgcgcccataaaacgccccctccgggcggctagggcaggtgagcgcgtccccgggcctccccacgccggcccctgccacagagccgtctaggtcgagcagatatttacagaataaaaatgacaataactcgacgtcccgggacggccacgcaatctgttagtaatttagcgggatgggaatttcctttctagggcctgccagtgaagcgcttttccaaatttccacagcgggggaagcctgcgattttacataatgacttcagcatgccgggctttctcgacacccctccccggcccccggcccccgccccccgccccttttccagcagggccgggctccctccggacacccgcgtggactcaggcgtcccgtctggcccgttcgcccccgtttcccccgccagccccagcgcccccctgcccggcccccggattccccgttcccgcccctacgcccccatcccctccccgtgcgcccctccccgtgcgcccccctccccgtgcgccccccctccccgtgcgcccccctccccgtgcgccccccctccccgggcgcccccctccccgggcgccccccctccccgtgcgcccccccctccccgtgcgccccccctccccgtgcgcgccccgcctcttgcgcccctgcccccaggcgagcggctgccgcggcgcggggaggggcgggcgctcggcgactcgtccccggggccccgcgcgggcccgggcagcaggggcgtgatgtcacggcagggagggggcgcgggagccgccgggccggcggggaggcgggggaggtgttttccagctttaaaaaggcaggaggcagagcgcggccctgcgtcagagcgagactcagaggtctagagccaccatgagcctctggcagcccctggtcctggtgctcctggtgctgggctgctgctttgctgcccccagacagcgccagtccacccttgtgctcttccctggagacctgagaaccaatctcaccgacaggcagctggcagaggaatacctgtaccgctatggttacactcgggtggcagagatgcgtggagagtcgaaatctctggggcctgcgctgctgcttctccagaagcaactgtccctgcccgagaccggtgagctggatagcgccacgctgaaggccatgcgaaccccacggtgcggggtcccagacctgggcagattccaaacctttgagggcgacctcaagtggcaccaccacaacatcacctattggatccaaaactactcggaagacttgccgcgggcggtgattgacgacgcctttgcccgcgccttcgcactgtggagcgcggtgacgccgctcaccttcactcgcgtgtacagccgggacgcagacatcgtcatccagtttggtgtcgcggagcacggagacgggtatcccttcgacgggaaggacgggctcctggcacacgcctttcctcctggccccggcattcagggagacgcccatttcgacgatgacgagttgtggtccctgggcaagggcgtcgtggttccaactcggtttggaaacgcagatggcgcggcctgccacttccccttcatcttcgagggccgctcctactctgcctgcaccaccgacggtcgctccgacggcttgccctggtgcagtaccacggccaactacgacaccgacgaccggtttggcttctgccccagcgagagactctacacccaggacggcaatgctgatgggaaaccctgccagtttccattcatcttccaaggccaatcctactccgcctgcaccacggacggtcgctccgacggctaccgctggtgcgccaccaccgccaactacgaccgggacaagctcttcggcttctgcccgacccgagctgactcgacggtgatggggggcaactcggcgggggagctgtgcgtcttccccttcactttcctgggtaaggagtactcgacctgtaccagcgagggccgcggagatgggcgcctctggtgcgctaccacctcgaactttgacagcgacaagaagtggggcttctgcccggaccaaggatacagtttgttcctcgtggcggcgcatgagttcggccacgcgctgggcttagatcattcctcagtgccggaggcgctcatgtaccctatgtaccgcttcactgaggggccccccttgcataaggacgacgtgaatggcatccggcacctctatggtcctcgccctgaacctgagccacggcctccaaccaccaccacaccgcagcccacggctcccccgacggtctgccccaccggaccccccactgtccacccctcagagcgccccacagctggccccacaggtcccccctcagctggccccacaggtccccccactgctggcccttctacggccactactgtgcctttgagtccggtggacgatgcctgcaacgtgaacatcttcgacgccatcgcggagattgggaaccagctgtatttgttcaaggatgggaagtactggcgattctctgagggcagggggagccggccgcagggccccttccttatcgccgacaagtggcccgcgctgccccgcaagctggactcggtctttgaggagcggctctccaagaagcttttcttcttctctgggcgccaggtgtgggtgtacacaggcgcgtcggtgctgggcccgaggcgtctggacaagctgggcctgggagccgacgtggcccaggtgaccggggccctccggagtggcagggggaagatgctgctgttcagcgggcggcgcctctggaggttcgacgtgaaggcgcagatggtggatccccggagcgccagcgaggtggaccggatgttccccggggtgcctttggacacgcacgacgtcttccagtaccgagagaaagcctatttctgccaggaccgcttctactggcgcgtgagttcccggagtgagttgaaccaggtggaccaagtgggctacgtgacctatgacatcctgcagtgccctgaggacgattacaaggatgacgacgataagtgataa

SEQ ID NO: 648 - DNA, 3260 bp, Artificial Sequence
  NFATc1PMMP9cat
aggcaggaggaagaggaaaggggcgcagggcgctcggggagcagagccgggggcccgcggtggccgcagaggccgggccggggcgcagaggccgggcgagctggccgcgctctgggccgccgcctccggaactccctgcgcctggcgcgcggccaccgtggtcccggcaacggcattaaacagagggaaacagacccgggattccgtcacccgggcggggggataaggacggctttgagagcagacaggaaaagggagcttttctgcatggggtgaaaaaattatttattgaaggaggaggaggcggcagcggaggaaggggaggggcgggaggaggaggaagagccggccgcccccgccccggccccggctcctcaggagccaagggcagcctcgccaggtcggtcccgggctcgaggaccgcggctggggtcgaggggctcagtctcccacgtgaccggctgggcgcgccccgccagacccggcctcgggattccctcctcccggcgagtctccgcccgccccgtcctggaggtggggagaaggagggcggggcgggggggacggaaactctccccgccaaatcctggccccaggcctggggacactcgcggcgggaagatttggaggggaggggagggggaggggcgtgggggcgcggcctcgctggagtccccctgaccccccgacccccgcccaccggcctgggcgtcctcccgcggcccctcctcccctcccggcgcccggtgctctggggcgcgtgccacgcctggctcggcgccgtaggggcccccgcaggtagagacccctggaaatggcctcgacgccgcaggagcgaggcggccaccaccccgctaatccgggcacgtctctccaggccgaggcctgcggtggaaaagccggggttccatttgtgctgagtcggggcggccgaatggagccaggcctcgggacgcgggacggacgggctctggccgcgcaccttcgcgggctctgcagcgcccgaccgcctcccccggcagggaggaggcgcttgtggggggcacccacggggcacagtgatccctgggggtctgcggacctcctgggccccgcagcagacacgagtttagcctttgggtttagtttaaatcacataagggtgtcgtgcaatcgatttatggtttctacacaccagacactttaacctccaaccccccccatccaagccaacaagaaaatgcggtgccgtgttggcagctgagctgcgcccgaagagacgcagggagacgtaagagaggaaagtgtgagtggccggggggcctccccccgtcagaagtcgcgcagtcgcgcccataaaacgccccctccgggcggctagggcaggtgagcgcgtccccgggcctccccacgccggcccctgccacagagccgtctaggtcgagcagatatttacagaataaaaatgacaataactcgacgtcccgggacggccacgcaatctgttagtaatttagcgggatgggaatttcctttctagggcctgccagtgaagcgcttttccaaatttccacagcgggggaagcctgcgattttacataatgacttcagcatgccgggctttctcgacacccctccccggcccccggcccccgccccccgccccttttccagcagggccgggctccctccggacacccgcgtggactcaggcgtcccgtctggcccgttcgcccccgtttcccccgccagccccagcgcccccctgcccggcccccggattccccgttcccgcccctacgcccccatcccctccccgtgcgcccctccccgtgcgcccccctccccgtgcgccccccctccccgtgcgcccccctccccgtgcgccccccctccccgggcgcccccctccccgggcgccccccctccccgtgcgcccccccctccccgtgcgccccccctccccgtgcgcgccccgcctcttgcgcccctgcccccaggcgagcggctgccgcggcgcggggaggggcgggcgctcggcgactcgtccccggggccccgcgcgggcccgggcagcaggggcgtgatgtcacggcagggagggggcgcgggagccgccgggccggcggggaggcgggggaggtgttttccagctttaaaaaggcaggaggcagagcgcggccctgcgtcagagcgagactcagaggtctagagccaccatgttccaaacctttgagggcgacctcaagtggcaccaccacaacatcacctattggatccaaaactactcggaagacttgccgcgggcggtgattgacgacgcctttgcccgcgccttcgcactgtggagcgcggtgacgccgctcaccttcactcgcgtgtacagccgggacgcagacatcgtcatccagtttggtgtcgcggagcacggagacgggtatcccttcgacgggaaggacgggctcctggcacacgcctttcctcctggccccggcattcagggagacgcccatttcgacgatgacgagttgtggtccctgggcaagggcgtcgtggttccaactcggtttggaaacgcagatggcgcggcctgccacttccccttcatcttcgagggccgctcctactctgcctgcaccaccgacggtcgctccgacggcttgccctggtgcagtaccacggccaactacgacaccgacgaccggtttggcttctgccccagcgagagactctacacccaggacggcaatgctgatgggaaaccctgccagtttccattcatcttccaaggccaatcctactccgcctgcaccacggacggtcgctccgacggctaccgctggtgcgccaccaccgccaactacgaccgggacaagctcttcggcttctgcccgacccgagctgactcgacggtgatggggggcaactcggcgggggagctgtgcgtcttccccttcactttcctgggtaaggagtactcgacctgtaccagcgagggccgcggagatgggcgcctctggtgcgctaccacctcgaactttgacagcgacaagaagtggggcttctgcccggaccaaggatacagtttgttcctcgtggcggcgcatgagttcggccacgcgctgggcttagatcattcctcagtgccggaggcgctcatgtaccctatgtaccgcttcactgaggggccccccttgcataaggacgacgtgaatggcatccggcacctctatggtcctcgccctgaacctgattacaaggatgacgacgataagtgataa

SEQ ID NO: 649 - DNA, 30 bp, Artificial Sequence
  NFAT response element
ggaggaaaaactgtttcatacagaaggcgt

SEQ ID NO: 650 - DNA, 90 bp, Artificial Sequence
  NFAT response element repeats
ggaggaaaaactgtttcatacagaaggcgtggaggaaaaactgtttcatacagaaggcgtggaggaaaaactgtttcatacagaaggcgt

SEQ ID NO: 651 - DNA, 61 bp, Artificial Sequence
  CMV minimal promoter
aggtaggcgtgtacggtgggaggtctatataagcagagctggtttagtgaaccgtcagatc

SEQ ID NO: 652 - DNA, 2326 bp, Artificial Sequence
  NFATREmCMVMMP9
ggaggaaaaactgtttcatacagaaggcgtggaggaaaaactgtttcatacagaaggcgtggaggaaaaactgtttcatacagaaggcgtagatctagactcaggtaggcgtgtacggtgggaggtctatataagcagagctggtttagtgaaccgtcagatctctagagccaccatgagcctctggcagcccctggtcctggtgctcctggtgctgggctgctgctttgctgcccccagacagcgccagtccacccttgtgctcttccctggagacctgagaaccaatctcaccgacaggcagctggcagaggaatacctgtaccgctatggttacactcgggtggcagagatgcgtggagagtcgaaatctctggggcctgcgctgctgcttctccagaagcaactgtccctgcccgagaccggtgagctggatagcgccacgctgaaggccatgcgaaccccacggtgcggggtcccagacctgggcagattccaaacctttgagggcgacctcaagtggcaccaccacaacatcacctattggatccaaaactactcggaagacttgccgcgggcggtgattgacgacgcctttgcccgcgccttcgcactgtggagcgcggtgacgccgctcaccttcactcgcgtgtacagccgggacgcagacatcgtcatccagtttggtgtcgcggagcacggagacgggtatcccttcgacgggaaggacgggctcctggcacacgcctttcctcctggccccggcattcagggagacgcccatttcgacgatgacgagttgtggtccctgggcaagggcgtcgtggttccaactcggtttggaaacgcagatggcgcggcctgccacttccccttcatcttcgagggccgctcctactctgcctgcaccaccgacggtcgctccgacggcttgccctggtgcagtaccacggccaactacgacaccgacgaccggtttggcttctgccccagcgagagactctacacccaggacggcaatgctgatgggaaaccctgccagtttccattcatcttccaaggccaatcctactccgcctgcaccacggacggtcgctccgacggctaccgctggtgcgccaccaccgccaactacgaccgggacaagctcttcggcttctgcccgacccgagctgactcgacggtgatggggggcaactcggcgggggagctgtgcgtcttccccttcactttcctgggtaaggagtactcgacctgtaccagcgagggccgcggagatgggcgcctctggtgcgctaccacctcgaactttgacagcgacaagaagtggggcttctgcccggaccaaggatacagtttgttcctcgtggcggcgcatgagttcggccacgcgctgggcttagatcattcctcagtgccggaggcgctcatgtaccctatgtaccgcttcactgaggggccccccttgcataaggacgacgtgaatggcatccggcacctctatggtcctcgccctgaacctgagccacggcctccaaccaccaccacaccgcagcccacggctcccccgacggtctgccccaccggaccccccactgtccacccctcagagcgccccacagctggccccacaggtcccccctcagctggccccacaggtccccccactgctggcccttctacggccactactgtgcctttgagtccggtggacgatgcctgcaacgtgaacatcttcgacgccatcgcggagattgggaaccagctgtatttgttcaaggatgggaagtactggcgattctctgagggcagggggagccggccgcagggccccttccttatcgccgacaagtggcccgcgctgccccgcaagctggactcggtctttgaggagcggctctccaagaagcttttcttcttctctgggcgccaggtgtgggtgtacacaggcgcgtcggtgctgggcccgaggcgtctggacaagctgggcctgggagccgacgtggcccaggtgaccggggccctccggagtggcagggggaagatgctgctgttcagcgggcggcgcctctggaggttcgacgtgaaggcgcagatggtggatccccggagcgccagcgaggtggaccggatgttccccggggtgcctttggacacgcacgacgtcttccagtaccgagagaaagcctatttctgccaggaccgcttctactggcgcgtgagttcccggagtgagttgaaccaggtggaccaagtgggctacgtgacctatgacatcctgcagtgccctgaggacgattacaaggatgacgacgataagtgataa

SEQ ID NO: 653 - DNA, 1237 bp, Artificial Sequence
  NFATREmCMVMMP9cat
ggaggaaaaactgtttcatacagaaggcgtggaggaaaaactgtttcatacagaaggcgtggaggaaaaactgtttcatacagaaggcgtagatctagactcaggtaggcgtgtacggtgggaggtctatataagcagagctggtttagtgaaccgtcagatctctagagccaccatgttccaaacctttgagggcgacctcaagtggcaccaccacaacatcacctattggatccaaaactactcggaagacttgccgcgggcggtgattgacgacgcctttgcccgcgccttcgcactgtggagcgcggtgacgccgctcaccttcactcgcgtgtacagccgggacgcagacatcgtcatccagtttggtgtcgcggagcacggagacgggtatcccttcgacgggaaggacgggctcctggcacacgcctttcctcctggccccggcattcagggagacgcccatttcgacgatgacgagttgtggtccctgggcaagggcgtcgtggttccaactcggtttggaaacgcagatggcgcggcctgccacttccccttcatcttcgagggccgctcctactctgcctgcaccaccgacggtcgctccgacggcttgccctggtgcagtaccacggccaactacgacaccgacgaccggtttggcttctgccccagcgagagactctacacccaggacggcaatgctgatgggaaaccctgccagtttccattcatcttccaaggccaatcctactccgcctgcaccacggacggtcgctccgacggctaccgctggtgcgccaccaccgccaactacgaccgggacaagctcttcggcttctgcccgacccgagctgactcgacggtgatggggggcaactcggcgggggagctgtgcgtcttccccttcactttcctgggtaaggagtactcgacctgtaccagcgagggccgcggagatgggcgcctctggtgcgctaccacctcgaactttgacagcgacaagaagtggggcttctgcccggaccaaggatacagtttgttcctcgtggcggcgcatgagttcggccacgcgctgggcttagatcattcctcagtgccggaggcgctcatgtaccctatgtaccgcttcactgaggggccccccttgcataaggacgacgtgaatggcatccggcacctctatggtcctcgccctgaacctgattacaaggatgacgacgataagtgataa

SEQ ID NO: 654 - DNA, 747 bp, Artificial Sequence; identical to SEQ ID NO: 238
  C2 scFv

SEQ ID NO: 655 - protein, 249 aa, Artificial Sequence; identical to SEQ ID NO: 239
  C2 scFv

SEQ ID NO: 656 - DNA, 72 bp, Artificial Sequence
  CD8 transmembrane domain
atctacatctgggcgcccttggccgggacttgtggggtccttctcctgtcactggttatcaccctttactgc

SEQ ID NO: 657 - protein, 24 aa, Artificial Sequence
  CD8 transmembrane domain
IYIWAPLAGTCGVLLLSLVITLYC

SEQ ID NO: 658 - DNA, 126 bp, Artificial Sequence
  41BB domain
aaacggggcagaaagaaactcctgtatatattcaaacaaccatttatgagaccagtacaaactactcaagaggaagatggctgtagctgccgatttccagaagaagaagaaggaggatgtgaactg

SEQ ID NO: 659 - protein, 42 aa, Artificial Sequence; identical to SEQ ID NO: 380
  41BB domain

SEQ ID NO: 660 - DNA, 336 bp, Artificial Sequence
  CD3zeta domain
agagtgaagttcagcaggagcgcagacgcccccgcgtacaagcagggccagaaccagctctataacgagctcaatctaggacgaagagaggagtacgatgttttggacaagagacgtggccgggaccctgagatggggggaaagccgagaaggaagaaccctcaggaaggcctgtacaatgaactgcagaaagataagatggcggaggcctacagtgagattgggatgaaaggcgagcgccggaggggcaaggggcacgatggcctttaccagggtctcagtacagccaccaaggacacctacgacgcccttcacatgcaggccctgccccctcgc

SEQ ID NO: 661 - protein, 112 aa, Artificial Sequence; identical to SEQ ID NO: 374
  CD3zeta domain

SEQ ID NO: 662-717 - skipped (56 entries)

SEQ ID NO: 718 - DNA, 1485 bp, Artificial Sequence
  CART C2 CD8/CD8/41BB/CD3z #44 - NCD8lshuMNC2scFvCD8ecd fragment CD8 transmembrane 41BB CD3zetaC
atggccttaccagtgaccgccttgctcctgccgctggccttgctgctccacgccgccaggccggaggtgcagctggtggagtctgggggaggcctggtcaagcctggggggtccctgagactctcctgtgcagcctctggattcaccttcagtggctatgccatgagctgggtccgccaggctccagggaaggggctggagtgggtctcaaccattagtagtggcggaacctacatatactaccccgactcagtgaagggccgattcaccatctccagagacaacgccaagaactcactgtatctgcaaatgaacagcctgagagccgaggacacggccgtgtattactgtgcgagacttgggggggataattactacgaatacttcgatgtctggggcaaagggaccacggtcaccgtctcctccggcggtggcggatccggcggtggcggatccggcggtggcggatccgacattgtgctgacccagtctccagcctccttggccgtgtctccaggacagagggccaccatcacctgcagagccagtaagagtgtcagtaccagcggatactcctacatgcactggtatcagcagaaaccaggacaacctcctaaactcctgatttacctggcatccaatctggagagcggggtcccagccaggttcagcggcagtgggtctgggaccgatttcaccctcacaattaatcctgtggaagctaatgatactgcaaattattactgtcagcacagtagggagctgcctttcacattcggcggagggaccaaggtggagatcaaacgaactacaacaacccctgcccccagacctcctaccccagcccctacaattgccagccagcctctgagcctgaggcccgaggcttgtagacctgctgctggcggagccgtgcacaccagaggactggatttcgcctgcgacatctacatctgggcgcccttggccgggacttgtggggtccttctcctgtcactggttatcaccctttactgcaaacggggcagaaagaaactcctgtatatattcaaacaaccatttatgagaccagtacaaactactcaagaggaagatggctgtagctgccgatttccagaagaagaagaaggaggatgtgaactgagagtgaagttcagcaggagcgcagacgcccccgcgtacaagcagggccagaaccagctctataacgagctcaatctaggacgaagagaggagtacgatgttttggacaagagacgtggccgggaccctgagatggggggaaagccgagaaggaagaaccctcaggaaggcctgtacaatgaactgcagaaagataagatggcggaggcctacagtgagattgggatgaaaggcgagcgccggaggggcaaggggcacgatggcctttaccagggtctcagtacagccaccaaggacacctacgacgcccttcacatgcaggccctgccccctcgctgataa

SEQ ID NO: 719 - protein, 493 aa, Artificial Sequence; identical to SEQ ID NO: 611
  CART C2 CD8/CD8/41BB/CD3z #44 - NCD8lshuMNC2scFvCD8ecd fragment CD8 transmembrane 41BB CD3zetaC

SEQ ID NO: 720-773 - skipped (54 entries)

SEQ ID NO: 774 - DNA, 3829 bp, Artificial Sequence
  NFATc1P2MMP9
caggcctggggacactcgcggcgggaagatttggaggggaggggagggggaggggcgtgggggcgcggcctcgctggagtccccctgaccccccgacccccgcccaccggcctgggcgtcctcccgcggcccctcctcccctcccggcgcccggtgctctggggcgcgtgccacgcctggctcggcgccgtaggggcccccgcaggtagagacccctggaaatggcctcgacgccgcaggagcgaggcggccaccaccccgctaatccgggcacgtctctccaggccgaggcctgcggtggaaaagccggggttccatttgtgctgagtcggggcggccgaatggagccaggcctcgggacgcgggacggacgggctctggccgcgcaccttcgcgggctctgcagcgcccgaccgcctcccccggcagggaggaggcgcttgtggggggcacccacggggcacagtgatccctgggggtctgcggacctcctgggccccgcagcagacacgagtttagcctttgggtttagtttaaatcacataagggtgtcgtgcaatcgatttatggtttctacacaccagacactttaacctccaaccccccccatccaaagccaacaagaaaatgcggtgccgtgttggcagctgagctgcgcccgaagagacgcagggagacgtaagagaggaaagtgtgagtggccggggggcctccccccgtcagaagtcgcgcagtcgcgcccataaaacgccccctccgggcggctagggcaggtgagcgcgtccccgggcctccccacgccggcccctgccacaggccgtctaggtcgagcagatatttacagaataaaaatgacaataactcgacgtcccgggacggccacgcaatctgttagtaatttagcgggatgggaatttcctttctagggcctgccagtgaagcgcttttccaaatttccacagcgggggaagcctgcgattttacataatgacttcagcatgccgggctttctcgacacccctccccggcccccggcccccgccccccgccccttttccagcagggccgggctccctccggacacccgcgtggactcaggcgtcccgtctggcccgttcgcccccgtttcccccgccagccccagcgcccccctgcccggcccccggattccccgttcccgcccctacgcccccatcccctccccgtgcgcccctccccgtgcgcccccctccccgtgcgccccccctccccgtgcgcccccctccccgtgcgccccccctccccgggcgcccccctccccgggcgccccccctccccgtgcgcccccccctccccgtgcgccccccctccccgtgcgcgccccgcctcttgcgcccctgcccccaggcgagcggctgccgcggcgcggggaggggcgggcgctcggcgactcgtccccggggccccgcgcgggcccgggcagcaggggcgtgatgtcacggcagggagggggcgcgggagccgccgggccggcggggaggcgggggaggtgttttccagctttaaaaaggcaggaggcagagcgcggccctgcgtcagagcgagactcagaggctccgaactcgccggcggagtcgccgcgccagatcccagcagcagggcgcggaagcttctctcgacattcgtttctagagccaccatgagcctctggcagcccctggtcctggtgctcctggtgctgggctgctgctttgctgcccccagacagcgccagtccacccttgtgctcttccctggagacctgagaaccaatctcaccgacaggcagctggcagaggaatacctgtaccgctatggttacactcgggtggcagagatgcgtggagagtcgaaatctctggggcctgcgctgctgcttctccagaagcaactgtccctgcccgagaccggtgagctggatagcgccacgctgaaggccatgcgaaccccacggtgcggggtcccagacctgggcagattccaaacctttgagggcgacctcaagtggcaccaccacaacatcacctattggatccaaaactactcggaagacttgccgcgggcggtgattgacgacgcctttgcccgcgccttcgcactgtggagcgcggtgacgccgctcaccttcactcgcgtgtacagccgggacgcagacatcgtcatccagtttggtgtcgcggagcacggagacgggtatcccttcgacgggaaggacgggctcctggcacacgcctttcctcctggccccggcattcagggagacgcccatttcgacgatgacgagttgtggtccctgggcaagggcgtcgtggttccaactcggtttggaaacgcagatggcgcggcctgccacttccccttcatcttcgagggccgctcctactctgcctgcaccaccgacggtcgctccgacggcttgccctggtgcagtaccacggccaactacgacaccgacgaccggtttggcttctgccccagcgagagactctacacccaggacggcaatgctgatgggaaaccctgccagtttccattcatcttccaaggccaatcctactccgcctgcaccacggacggtcgctccgacggctaccgctggtgcgccaccaccgccaactacgaccgggacaagctcttcggcttctgcccgacccgagctgactcgacggtgatggggggcaactcggcgggggagctgtgcgtcttccccttcactttcctgggtaaggagtactcgacctgtaccagcgagggccgcggagatgggcgcctctggtgcgctaccacctcgaactttgacagcgacaagaagtggggcttctgcccggaccaaggatacagtttgttcctcgtggcggcgcatgagttcggccacgcgctgggcttagatcattcctcagtgccggaggcgctcatgtaccctatgtaccgcttcactgaggggccccccttgcataaggacgacgtgaatggcatccggcacctctatggtcctcgccctgaacctgagccacggcctccaaccaccaccacaccgcagcccacggctcccccgacggtctgccccaccggaccccccactgtccacccctcagagcgccccacagctggccccacaggtcccccctcagctggccccacaggtccccccactgctggcccttctacggccactactgtgcctttgagtccggtggacgatgcctgcaacgtgaacatcttcgacgccatcgcggagattgggaaccagctgtatttgttcaaggatgggaagtactggcgattctctgagggcagggggagccggccgcagggccccttccttatcgccgacaagtggcccgcgctgccccgcaagctggactcggtctttgaggagcggctctccaagaagcttttcttcttctctgggcgccaggtgtgggtgtacacaggcgcgtcggtgctgggcccgaggcgtctggacaagctgggcctgggagccgacgtggcccaggtgaccggggccctccggagtggcagggggaagatgctgctgttcagcgggcggcgcctctggaggttcgacgtgaaggcgcagatggtggatccccggagcgccagcgaggtggaccggatgttccccggggtgcctttggacacgcacgacgtcttccagtaccgagagaaagcctatttctgccaggaccgcttctactggcgcgtgagttcccggagtgagttgaaccaggtggaccaagtgggctacgtgacctatgacatcctgcagtgccctgaggacgattacaaggatgacgacgataagtgataa

SEQ ID NO: 775 - DNA, 2794 bp, Artificial Sequence
  NFATc1P2MMP9cat
caggcctggggacactcgcggcgggaagatttggaggggaggggagggggaggggcgtgggggcgcggcctcgctggagtccccctgaccccccgacccccgcccaccggcctgggcgtcctcccgcggcccctcctcccctcccggcgcccggtgctctggggcgcgtgccacgcctggctcggcgccgtaggggcccccgcaggtagagacccctggaaatggcctcgacgccgcaggagcgaggcggccaccaccccgctaatccgggcacgtctctccaggccgaggcctgcggtggaaaagccggggttccatttgtgctgagtcggggcggccgaatggagccaggcctcgggacgcgggacggacgggctctggccgcgcaccttcgcgggctctgcagcgcccgaccgcctcccccggcagggaggaggcgcttgtggggggcacccacggggcacagtgatccctgggggtctgcggacctcctgggccccgcagcagacacgagtttagcctttgggtttagtttaaatcacataagggtgtcgtgcaatcgatttatggtttctacacaccagacactttaacctccaaccccccccatccaaagccaacaagaaaatgcggtgccgtgttggcagctgagctgcgcccgaagagacgcagggagacgtaagagaggaaagtgtgagtggccggggggcctccccccgtcagaagtcgcgcagtcgcgcccataaaacgccccctccgggcggctagggcaggtgagcgcgtccccgggcctccccacgccggcccctgccacaggccgtctaggtcgagcagatatttacagaataaaaatgacaataactcgacgtcccgggacggccacgcaatctgttagtaatttagcgggatgggaatttcctttctagggcctgccagtgaagcgcttttccaaatttccacagcgggggaagcctgcgattttacataatgacttcagcatgccgggctttctcgacacccctccccggcccccggcccccgccccccgccccttttccagcagggccgggctccctccggacacccgcgtggactcaggcgtcccgtctggcccgttcgcccccgtttcccccgccagccccagcgcccccctgcccggcccccggattccccgttcccgcccctacgcccccatcccctccccgtgcgcccctccccgtgcgcccccctccccgtgcgccccccctccccgtgcgcccccctccccgtgcgccccccctccccgggcgcccccctccccgggcgccccccctccccgtgcgcccccccctccccgtgcgccccccctccccgtgcgcgccccgcctcttgcgcccctgcccccaggcgagcggctgccgcggcgcggggaggggcgggcgctcggcgactcgtccccggggccccgcgcgggcccgggcagcaggggcgtgatgtcacggcagggagggggcgcgggagccgccgggccggcggggaggcgggggaggtgttttccagctttaaaaaggcaggaggcagagcgcggccctgcgtcagagcgagactcagaggctccgaactcgccggcggagtcgccgcgccagatcccagcagcagggcgcggaagcttctctcgacattcgtttctagagccaccatgagcctctggcagcccctggtcctggtgctcctggtgctgggctgctgctttgctttccaaacctttgagggcgacctcaagtggcaccaccacaacatcacctattggatccaaaactactcggaagacttgccgcgggcggtgattgacgacgcctttgcccgcgccttcgcactgtggagcgcggtgacgccgctcaccttcactcgcgtgtacagccgggacgcagacatcgtcatccagtttggtgtcgcggagcacggagacgggtatcccttcgacgggaaggacgggctcctggcacacgcctttcctcctggccccggcattcagggagacgcccatttcgacgatgacgagttgtggtccctgggcaagggcgtcgtggttccaactcggtttggaaacgcagatggcgcggcctgccacttccccttcatcttcgagggccgctcctactctgcctgcaccaccgacggtcgctccgacggcttgccctggtgcagtaccacggccaactacgacaccgacgaccggtttggcttctgccccagcgagagactctacacccaggacggcaatgctgatgggaaaccctgccagtttccattcatcttccaaggccaatcctactccgcctgcaccacggacggtcgctccgacggctaccgctggtgcgccaccaccgccaactacgaccgggacaagctcttcggcttctgcccgacccgagctgactcgacggtgatggggggcaactcggcgggggagctgtgcgtcttccccttcactttcctgggtaaggagtactcgacctgtaccagcgagggccgcggagatgggcgcctctggtgcgctaccacctcgaactttgacagcgacaagaagtggggcttctgcccggaccaaggatacagtttgttcctcgtggcggcgcatgagttcggccacgcgctgggcttagatcattcctcagtgccggaggcgctcatgtaccctatgtaccgcttcactgaggggccccccttgcataaggacgacgtgaatggcatccggcacctctatggtcctcgccctgaacctgattacaaggatgacgacgataagtgataa

SEQ ID NO: 776 - DNA, 32 bp, Artificial Sequence
  NFAT response element 2
aagaggaaaatttgtttcatacagaaggcgtt

SEQ ID NO: 777 - DNA, 128 bp, Artificial Sequence
  NFAT response element 2 repeats
aagaggaaaatttgtttcatacagaaggcgttaagaggaaaatttgtttcatacagaaggcgttaagaggaaaatttgtttcatacagaaggcgttaagaggaaaatttgtttcatacagaaggcgtt

SEQ ID NO: 778 - DNA, 118 bp, Artificial Sequence
  CMV minimal promoter 2
taggcgtgtacggtgggaggcctatataagcagagctcgtttagtgaaccgtcagatcgcctggagacgccatccacgctgttttgacctccatagaagacaccgggaccgatccagc

SEQ ID NO: 779 - DNA, 2430 bp, Artificial Sequence
  NFATRE2mCMV2MMP9
aagaggaaaatttgtttcatacagaaggcgttaagaggaaaatttgtttcatacagaaggcgttaagaggaaaatttgtttcatacagaaggcgttaagaggaaaatttgtttcatacagaaggcgttactagttaggcgtgtacggtgggaggcctatataagcagagctcgtttagtgaaccgtcagatcgcctggagacgccatccacgctgttttgacctccatagaagacaccgggaccgatccagcctctcgacattcgtttctagagccaccatgagcctctggcagcccctggtcctggtgctcctggtgctgggctgctgctttgctgcccccagacagcgccagtccacccttgtgctcttccctggagacctgagaaccaatctcaccgacaggcagctggcagaggaatacctgtaccgctatggttacactcgggtggcagagatgcgtggagagtcgaaatctctggggcctgcgctgctgcttctccagaagcaactgtccctgcccgagaccggtgagctggatagcgccacgctgaaggccatgcgaaccccacggtgcggggtcccagacctgggcagattccaaacctttgagggcgacctcaagtggcaccaccacaacatcacctattggatccaaaactactcggaagacttgccgcgggcggtgattgacgacgcctttgcccgcgccttcgcactgtggagcgcggtgacgccgctcaccttcactcgcgtgtacagccgggacgcagacatcgtcatccagtttggtgtcgcggagcacggagacgggtatcccttcgacgggaaggacgggctcctggcacacgcctttcctcctggccccggcattcagggagacgcccatttcgacgatgacgagttgtggtccctgggcaagggcgtcgtggttccaactcggtttggaaacgcagatggcgcggcctgccacttccccttcatcttcgagggccgctcctactctgcctgcaccaccgacggtcgctccgacggcttgccctggtgcagtaccacggccaactacgacaccgacgaccggtttggcttctgccccagcgagagactctacacccaggacggcaatgctgatgggaaaccctgccagtttccattcatcttccaaggccaatcctactccgcctgcaccacggacggtcgctccgacggctaccgctggtgcgccaccaccgccaactacgaccgggacaagctcttcggcttctgcccgacccgagctgactcgacggtgatggggggcaactcggcgggggagctgtgcgtcttccccttcactttcctgggtaaggagtactcgacctgtaccagcgagggccgcggagatgggcgcctctggtgcgctaccacctcgaactttgacagcgacaagaagtggggcttctgcccggaccaaggatacagtttgttcctcgtggcggcgcatgagttcggccacgcgctgggcttagatcattcctcagtgccggaggcgctcatgtaccctatgtaccgcttcactgaggggccccccttgcataaggacgacgtgaatggcatccggcacctctatggtcctcgccctgaacctgagccacggcctccaaccaccaccacaccgcagcccacggctcccccgacggtctgccccaccggaccccccactgtccacccctcagagcgccccacagctggccccacaggtcccccctcagctggccccacaggtccccccactgctggcccttctacggccactactgtgcctttgagtccggtggacgatgcctgcaacgtgaacatcttcgacgccatcgcggagattgggaaccagctgtatttgttcaaggatgggaagtactggcgattctctgagggcagggggagccggccgcagggccccttccttatcgccgacaagtggcccgcgctgccccgcaagctggactcggtctttgaggagcggctctccaagaagcttttcttcttctctgggcgccaggtgtgggtgtacacaggcgcgtcggtgctgggcccgaggcgtctggacaagctgggcctgggagccgacgtggcccaggtgaccggggccctccggagtggcagggggaagatgctgctgttcagcgggcggcgcctctggaggttcgacgtgaaggcgcagatggtggatccccggagcgccagcgaggtggaccggatgttccccggggtgcctttggacacgcacgacgtcttccagtaccgagagaaagcctatttctgccaggaccgcttctactggcgcgtgagttcccggagtgagttgaaccaggtggaccaagtgggctacgtgacctatgacatcctgcagtgccctgaggacgattacaaggatgacgacgataagtgataa

SEQ ID NO: 780 - DNA, 1401 bp, Artificial Sequence
  NFATRE2mCMV2MMP9cat
aagaggaaaatttgtttcatacagaaggcgttaagaggaaaatttgtttcatacagaaggcgttaagaggaaaatttgtttcatacagaaggcgttaagaggaaaatttgtttcatacagaaggcgttactagttaggcgtgtacggtgggaggcctatataagcagagctcgtttagtgaaccgtcagatcgcctggagacgccatccacgctgttttgacctccatagaagacaccgggaccgatccagcctcgagctctcgacattcgtttctagagccaccatgagcctctggcagcccctggtcctggtgctcctggtgctgggctgctgctttgctttccaaacctttgagggcgacctcaagtggcaccaccacaacatcacctattggatccaaaactactcggaagacttgccgcgggcggtgattgacgacgcctttgcccgcgccttcgcactgtggagcgcggtgacgccgctcaccttcactcgcgtgtacagccgggacgcagacatcgtcatccagtttggtgtcgcggagcacggagacgggtatcccttcgacgggaaggacgggctcctggcacacgcctttcctcctggccccggcattcagggagacgcccatttcgacgatgacgagttgtggtccctgggcaagggcgtcgtggttccaactcggtttggaaacgcagatggcgcggcctgccacttccccttcatcttcgagggccgctcctactctgcctgcaccaccgacggtcgctccgacggcttgccctggtgcagtaccacggccaactacgacaccgacgaccggtttggcttctgccccagcgagagactctacacccaggacggcaatgctgatgggaaaccctgccagtttccattcatcttccaaggccaatcctactccgcctgcaccacggacggtcgctccgacggctaccgctggtgcgccaccaccgccaactacgaccgggacaagctcttcggcttctgcccgacccgagctgactcgacggtgatggggggcaactcggcgggggagctgtgcgtcttccccttcactttcctgggtaaggagtactcgacctgtaccagcgagggccgcggagatgggcgcctctggtgcgctaccacctcgaactttgacagcgacaagaagtggggcttctgcccggaccaaggatacagtttgttcctcgtggcggcgcatgagttcggccacgcgctgggcttagatcattcctcagtgccggaggcgctcatgtaccctatgtaccgcttcactgaggggccccccttgcataaggacgacgtgaatggcatccggcacctctatggtcctcgccctgaacctgattacaaggatgacgacgataagtgataa

SEQ ID NO: 781 - DNA, 2238 bp, Artificial Sequence
  NFATc1 Promoter fragment (P1)
aggcaggaggaagaggaaaggggcgcagggcgctcggggagcagagccgggggcccgcggtggccgcagaggccgggccggggcgcagaggccgggcgagctggccgcgctctgggccgccgcctccggaactccctgcgcctggcgcgcggccaccgtggtcccggcaacggcattaaacagagggaaacagacccgggattccgtcacccgggcggggggataaggacggctttgagagcagacaggaaaagggagcttttctgcatggggtgaaaaaattatttattgaaggaggaggaggcggcagcggaggaaggggaggggcgggaggaggaggaagagccggccgcccccgccccggccccggctcctcaggagccaagggcagcctcgccaggtcggtcccgggctcgaggaccgcggctggggtcgaggggctcagtctcccacgtgaccggctgggcgcgccccgccagacccggcctcgggattccctcctcccggcgagtctccgcccgccccgtcctggaggtggggagaaggagggcggggcgggggggacggaaactctccccgccaaatcctggccccaggcctggggacactcgcggcgggaagatttggaggggaggggagggggaggggcgtgggggcgcggcctcgctggagtccccctgaccccccgacccccgcccaccggcctgggcgtcctcccgcggcccctcctcccctcccggcgcccggtgctctggggcgcgtgccacgcctggctcggcgccgtaggggcccccgcaggtagagacccctggaaatggcctcgacgccgcaggagcgaggcggccaccaccccgctaatccgggcacgtctctccaggccgaggcctgcggtggaaaagccggggttccatttgtgctgagtcggggcggccgaatggagccaggcctcgggacgcgggacggacgggctctggccgcgcaccttcgcgggctctgcagcgcccgaccgcctcccccggcagggaggaggcgcttgtggggggcacccacggggcacagtgatccctgggggtctgcggacctcctgggccccgcagcagacacgagtttagcctttgggtttagtttaaatcacataagggtgtcgtgcaatcgatttatggtttctacacaccagacactttaacctccaaccccccccatccaagccaacaagaaaatgcggtgccgtgttggcagctgagctgcgcccgaagagacgcagggagacgtaagagaggaaagtgtgagtggccggggggcctccccccgtcagaagtcgcgcagtcgcgcccataaaacgccccctccgggcggctagggcaggtgagcgcgtccccgggcctccccacgccggcccctgccacagagccgtctaggtcgagcagatatttacagaataaaaatgacaataactcgacgtcccgggacggccacgcaatctgttagtaatttagcgggatgggaatttcctttctagggcctgccagtgaagcgcttttccaaatttccacagcgggggaagcctgcgattttacataatgacttcagcatgccgggctttctcgacacccctccccggcccccggcccccgccccccgccccttttccagcagggccgggctccctccggacacccgcgtggactcaggcgtcccgtctggcccgttcgcccccgtttcccccgccagccccagcgcccccctgcccggcccccggattccccgttcccgcccctacgcccccatcccctccccgtgcgcccctccccgtgcgcccccctccccgtgcgccccccctccccgtgcgcccccctccccgtgcgccccccctccccgggcgcccccctccccgggcgccccccctccccgtgcgcccccccctccccgtgcgccccccctccccgtgcgcgccccgcctcttgcgcccctgcccccaggcgagcggctgccgcggcgcggggaggggcgggcgctcggcgactcgtccccggggccccgcgcgggcccgggcagcaggggcgtgatgtcacggcagggagggggcgcgggagccgccgggccggcggggaggcgggggaggtgttttccagctttaaaaaggcaggaggcagagcgcggccctgcgtcagagcgagactcagaggctccgaactcgccggcggagtcgccgcgccagatcccagcagcagggcgcgg

SEQ ID NO: 782 - DNA, 2186 bp, Artificial Sequence; identical to SEQ ID NO: 646
  NFATc1 Promoter fragment (P2)

SEQ ID NO: 783 - DNA, 1645 bp, Artificial Sequence
  NFATc1 Promoter fragment (P3)
caggcctggggacactcgcggcgggaagatttggaggggaggggagggggaggggcgtgggggcgcggcctcgctggagtccccctgaccccccgacccccgcccaccggcctgggcgtcctcccgcggcccctcctcccctcccggcgcccggtgctctggggcgcgtgccacgcctggctcggcgccgtaggggcccccgcaggtagagacccctggaaatggcctcgacgccgcaggagcgaggcggccaccaccccgctaatccgggcacgtctctccaggccgaggcctgcggtggaaaagccggggttccatttgtgctgagtcggggcggccgaatggagccaggcctcgggacgcgggacggacgggctctggccgcgcaccttcgcgggctctgcagcgcccgaccgcctcccccggcagggaggaggcgcttgtggggggcacccacggggcacagtgatccctgggggtctgcggacctcctgggccccgcagcagacacgagtttagcctttgggtttagtttaaatcacataagggtgtcgtgcaatcgatttatggtttctacacaccagacactttaacctccaaccccccccatccaaagccaacaagaaaatgcggtgccgtgttggcagctgagctgcgcccgaagagacgcagggagacgtaagagaggaaagtgtgagtggccggggggcctccccccgtcagaagtcgcgcagtcgcgcccataaaacgccccctccgggcggctagggcaggtgagcgcgtccccgggcctccccacgccggcccctgccacaggccgtctaggtcgagcagatatttacagaataaaaatgacaataactcgacgtcccgggacggccacgcaatctgttagtaatttagcgggatgggaatttcctttctagggcctgccagtgaagcgcttttccaaatttccacagcgggggaagcctgcgattttacataatgacttcagcatgccgggctttctcgacacccctccccggcccccggcccccgccccccgccccttttccagcagggccgggctccctccggacacccgcgtggactcaggcgtcccgtctggcccgttcgcccccgtttcccccgccagccccagcgcccccctgcccggcccccggattccccgttcccgcccctacgcccccatcccctccccgtgcgcccctccccgtgcgcccccctccccgtgcgccccccctccccgtgcgcccccctccccgtgcgccccccctccccgggcgcccccctccccgggcgccccccctccccgtgcgcccccccctccccgtgcgccccccctccccgtgcgcgccccgcctcttgcgcccctgcccccaggcgagcggctgccgcggcgcggggaggggcgggcgctcggcgactcgtccccggggccccgcgcgggcccgggcagcaggggcgtgatgtcacggcagggagggggcgcgggagccgccgggccggcggggaggcgggggaggtgttttccagctttaaaaaggcaggaggcagagcgcggccctgcgtcagagcgagactcagaggctccgaactcgccggcggagtcgccgcgccagatcccagcagcagggcgcgg

SEQ ID NO: 784 - DNA, 927 bp, Artificial Sequence
  pNFATMMP9cat1 gBLOCK sequence
aagaggaaaatttgtttcatacagaaggcgttactagttaggcgtgtacggtgggaggcctatataagcagagctcgtttagtgaaccgtcagatcgcctggagacgccatccacgctgttttgacctccatagaagacaccgggaccgatccagcctctcgacattcgtttctagagccaccatgagcctctggcagcccctggtcctggtgctcctggtgctgggctgctgctttgctttccaaacctttgagggcgacctcaagtggcaccaccacaacatcacctattggatccaaaactactcggaagacttgccgcgggcggtgattgacgacgcctttgcccgcgccttcgcactgtggagcgcggtgacgccgctcaccttcactcgcgtgtacagccgggacgcagacatcgtcatccagtttggtgtcgcggagcacggagacgggtatcccttcgacgggaaggacgggctcctggcacacgcctttcctcctggccccggcattcagggagacgcccatttcgacgatgacgagttgtggtccctgggcaagggcgtcgtggttccaactcggtttggaaacgcagatggcgcggcctgccacttccccttcatcttcgagggccgctcctactctgcctgcaccaccgacggtcgctccgacggcttgccctggtgcagtaccacggccaactacgacaccgacgaccggtttggcttctgccccagcgagagactctacacccaggacggcaatgctgatgggaaaccctgccagtttccattcatcttccaaggccaatcctactccgcctgcaccacggacggtcgctccgacggctaccgctggtgcgccaccaccgccaactacgaccgggacaagctcttcggcttctgcccgacccgagctgactcg

SEQ ID NO: 785 - protein, 12 aa, Artificial Sequence
  Mouse 17H6 heavy chain variable complementarity determining regions 3 (CDR3) sequence
DYYGSNPAWFAY

SEQ ID NO: 786 - protein, 11 aa, Artificial Sequence
  Mouse 17H6 heavy chain variable framework 4 (FW4) sequence
WGQGTLVTVSA

SEQ ID NO: 787-803 - skipped (17 entries)

SEQ ID NO: 804 - protein, 13 aa, Artificial Sequence
  NFAT consensus sequence
ATGGAAAANATCN

SEQ ID NO: 805 - DNA, 32 bp, Artificial Sequence; identical to SEQ ID NO: 776
  Current NFAT RE (Form System Biosciences. The sequence is from the mouse IL2 promoter.)

SEQ ID NO: 806 - DNA, 812 bp, Artificial Sequence
  Mouse IL2 Promoter (highlighted in green the NFAT RE used, highlighted in yellow is the start codon)
aactagagacatataaaataacaccaacatccttagatacaacccttcctgagaatttattggacatcatactctttttaaaaagcataataaacatcaagacacttacacaaaatatgttaaattaaatttaaaacaacaacgacaaaatagtacctcaagctcaacaagcattttaggtgtccttagcttactatttctctggctaactgtatgaagccatctatcaccctgtgtgcaattagctcattgtgtagataagaaggtaaaaccatcttgaaacaggaaaccaatatccttcctgtctaatcaacaaatctaaaagatttattcttttcatctatctcctcttgcgtttgtccaccacaacaggctgcttacaggttcaggatggttttgacaaagagaacattttcatgagttacttttgtgtctccaccccaaagaggaaaatttgtttcatacagaaggcgttcattgtatgaattaaaactgccacctaagtgtgggctaacccgaccaagagggatttcacctaaatccattcagtcagtgtatgggggtttaaagaaattccagagagtcatcagaagaggaaaaacaaaaggtaatgctttctgccacacaggtagactctttgaaaatatgtgtaatatgtaaaacatcgtgacacccccatattatttttccagcattaacagtataaattgcctcccatgctgaagagctgcctatcacccttgctaatcactcctcacagtgacctcaagtcctgcaggcatgtacagcatgcagctcgcatcctgtgtcac

SEQ ID NO: 807 - DNA, 30 bp, Artificial Sequence; identical to SEQ ID NO: 649
  NFAT RE (Form PRomega. The sequence is from the humane IL2 promoter.)

SEQ ID NO: 808 - DNA, 33 bp, Artificial Sequence
  Possible NFAT RE from ET1 promoter
tccagggaaaatcggagtagaacaagagggatg

SEQ ID NO: 809 - DNA, 34 bp, Artificial Sequence
  Possible NFAT RE from ET1 promoter
actgttggaaaacgtaaacacgttattaaacggt

SEQ ID NO: 810 - DNA, 20 bp, Artificial Sequence
  Possible NFAT RE from human CD3?
tccttaacggaaaaacaaaa

SEQ ID NO: 811 - DNA, 20 bp, Artificial Sequence
  Possible NFAT RE from human CD3?
aaaggaaaaagtatatgttc

SEQ ID NO: 812 - DNA, 17 bp, Artificial Sequence
  Possible NFAT RE from human IL3 promoter
atgccatggaaagggtg

SEQ ID NO: 813 - DNA, 22 bp, Artificial Sequence
  Possible NFAT RE from human GPC6
aaggggaaatgttgagtctaga

SEQ ID NO: 814 - DNA, 17 bp, Artificial Sequence
  Possible NFAT RE from human growth hormonereleasing hormone
aacttggaaaagcatag

SEQ ID NO: 815 - DNA, 5320 bp, Artificial Sequence
  NFATc1 promoter large
ttatgccgtctagaggagacatactttctactcaaagctacacacatagactacaacgatgggaaaagacgacacaccaacagcgacttcaggaaagctggagtggctgctaatgttagacaaaataggctttttaaaaaaggttttattaaagaggaatgtttcgtaatgataaaagcactaatctgtgagaaagatacaacaatgataaacatacgtgcagctaataagagagctccaaaatctatgaagcaaaaactcacagaatgaggggagaagcagttctacaacagagaatggggacttcgatactccactttcaataatggatacaacaaccaggcagataacaaggcaacagaaggcctgaacaacagtataaaccaattagacctaccagatatctatagctagcacactccacccaacgacagcagaatacacattcttctcaagcgcacaagtaacatcctccaggatgggccatgttctaggccatcaaacaaactcaggtggtttgaggccagaggcctctcttttaaccaccacactagggccttcggaggaggcaagcagagagttgtcaaagaggccctcaggactgggtgcagtggctcatgactgtaatcccagcactttagaaggctgaggcacaaggatcttttgagctcaggagttcaagaaatgagcacttatccactgggcgcggtggctcacgccagtaatccagcactttgggaggcttaggcgggcggatcaagaggtcagaagctcaagaccagcctgaccaacatggtgaaaccccgtctctactaaaagtacaaaaattagccgggcgtggtggcgcacacctgtaatcccagctacttgggaggctgaggcaggagaatcacttgaacccgggaggtggaggttgcagtgagtggagatcacaccattgcaccccagcctgggcaacagagcgagactccgtctcaaaaaaaaaaaaaaaaaaaaagaaagaaagaaaaagaaaaaaaaagtgagcatgtattttgccagagtctggagattagaattaaattagcaaaccagaattatagaaaaagctatttacttttaagtaaacagctgagatttttttttttaagtcagtgtgaatgaagctcacagccatggttggagctgagaaagaaggatttccctttagttatgcacctgtgtcagcaccttctgactttccttctaaagtctggggtgttcctgaggatccgtaagtttggggttcagggtttctacagcatgctgttacttgtgaaacatctctttaaccatgtcccagagttgcccaggagtttaagaccagcctgagcaacatagcaagacctcatctcaacaacaacaaaaattagaaataaattagccaggtgtggtgacatgtgcctgtagtcccagctactcagaaggctgaggcatgaggatcacttgggcccaggaagttggggctgcagggagccctgttcatgccgctgcactccagcctgcaagacagagcagaaaaaaagaatcaggatcctgggcagagggaggagaggggaccggggtccagcaagcacttggggattgactgaatggcgttggggagagatgactccaaagtcctggagtgggtgagaatgactgcgagtggcttttaggtggggaggttcctgcctggccactccgggaggggacgtggggctgaagggtatcaggtgccgtgctgagcagtttggccttgatcctaatgccctggacacacgtctagggtaggaaagttgactgatccattggtgatctgagtttttagacatggtggtagtccatgaggtgggtgttcatgctaagagtttagacagggaaacctatgaagcccttagcaaccctccagggaaggggcgtggttaaagagatgtttcataagtaacagcatggtatagaaactctgaaccccaaatgtatgggtcctcaggaacaccccagactttagaaggaaagtcagaaggtgctgacacgggtgtataactaaagggaaatccttctttctcagctccaaccatggctgtgaggttcattcacactgacttaaaaaaaaaaatctcagtttacttaaaagtaaatagctttttctataattctggtttgctaatttaatcctagtctccagaccctggctaaataaatgcccatttctccagatggtctcaagagtctctggacatcgtgggggcccttccctgttggttggaaggtgcctcaggaagaagggggtggattctgagttgagtcaaaacctcaaagacccctgatgggaaaagctctcaagtgaccaccgctgtgggccagaatgcaaaactgcaggaacagaacattcgcaggaacagaacacagtcgtattaagtgattttcccgagcaggaagtggcatctggcctgcggttcagtagggggaggaaagggtgggcgcacctgcccctggctggcgcacctgccaggtagccccacgcggcaccgcgtgtgccgagcgcccctgaggatggaaagccccacgcggggcaggtggcacccaccctccgaagacgggacgggatggagcgttgagcttcggggcagctccggcccggcccgcgctggagacgcccgcatctgccaggatggcgtctcatagccctggtgctcacacatgacgccaggaagccccagcaacagtgaccgcccaggctctagaaaatattggacggggtggatgaacacccaagtgcgctccaggagaagggatttggcaccccaaggggcttttaaaacggtaagcttctaggggtgtctttgcccccaataatccatagaaacaacagtcatctaaaaatagtcttgttttctgtcctaagctccttttaactttgttagtcatcaccaatcctaaaataaaacccgtgtaacgtctcccctagtagcggctataaacaaacctacgaggaggcaggaggaagaggaaaggggcgcagggcgctcggggagcagagccgggggcccgcggtggccgcagaggccgggccggggcgcagaggccgggcgagctggccgcgctctgggccgccgcctccggaactccctgcgcctggcgcgcggccaccgtggtcccggcaacggcattaaacagagggaaacagacccgggattccgtcacccgggcggggggataaggacggctttgagagcagacaggaaaagggagcttttctgcatggggtgaaaaaattatttattgaaggaggaggaggcggcagcggaggaaggggaggggcgggaggaggaggaagagccggccgcccccgccccggccccggctcctcaggagccaagggcagcctcgccaggtcggtcccgggctcgaggaccgcggctggggtcgaggggctcagtctcccacgtgaccggctgggcgcgccccgccagacccggcctcgggattccctcctcccggcgagtctccgcccgccccgtcctggaggtggggagaaggagggcggggcgggggggacggaaactctccccgccaaatcctggccccaggcctggggacactcgcggcgggaagatttggaggggaggggagggggaggggcgtgggggcgcggcctcgctggagtccccctgaccccccgacccccgcccaccggcctgggcgtcctcccgcggcccctcctcccctcccggcgcccggtgctctggggcgcgtgccacgcctggctcggcgccgtaggggcccccgcaggtagagacccctggaaatggcctcgacgccgcaggagcgaggcggccaccaccccgctaatccgggcacgtctctccaggccgaggcctgcggtggaaaagccggggttccatttgtgctgagtcggggcggccgaatggagccaggcctcgggacgcgggacggacgggctctggccgcgcaccttcgcgggctctgcagcgcccgaccgcctcccccggcagggaggaggcgcttgtggggggcacccacggggcacagtgatccctgggggtctgcggacctcctgggccccgcagcagacacgagtttagcctttgggtttagtttaaatcacataagggtgtcgtgcaatcgatttatggtttctacacaccagacactttaacctccaaccccccccatccaaagccaacaagaaaatgcggtgccgtgttggcagctgagctgcgcccgaagagacgcagggagacgtaagagaggaaagtgtgagtggccggggggcctccccccgtcagaagtcgcgcagtcgcgcccataaaacgccccctccgggcggctagggcaggtgagcgcgtccccgggcctccccacgccggcccctgccacaggccgtctaggtcgagcagatatttacagaataaaaatgacaataactcgacgtcccgggacggccacgcaatctgttagtaatttagcgggatgggaatttcctttctagggcctgccagtgaagcgcttttccaaatttccacagcgggggaagcctgcgattttacataatgacttcagcatgccgggctttctcgacacccctccccggcccccggcccccgccccccgccccttttccagcagggccgggctccctccggacacccgcgtggactcaggcgtcccgtctggcccgttcgcccccgtttcccccgccagccccagcgcccccctgcccggcccccggattccccgttcccgcccctacgcccccatcccctccccgtgcgcccctccccgtgcgcccccctccccgtgcgccccccctccccgtgcgcccccctccccgtgcgccccccctccccgggcgcccccctccccgggcgccccccctccccgtgcgcccccccctccccgtgcgccccccctccccgtgcgcgccccgcctcttgcgcccctgcccccaggcgagcggctgccgcggcgcggggaggggcgggcgctcggcgactcgtccccggggccccgcgcgggcccgggcagcaggggcgtgatgtcacggcagggagggggcgcgggagccgccgggccggcggggaggcgggggaggtgttttccagctttaaaaaggcaggaggcagagcgcggccctgcgtcagagcgagactcagaggctccgaactcgccggcggagtcgccgcgccagatcccagcagcagggcgcgggcaccggggcgcgggcagggctcggagccaccgcgcaggtcctagggccgcggccgggccccgccacgcgcgcacacgcccctcgatg

SEQ ID NO: 816 - DNA, 361 bp, Artificial Sequence
  NFATc3 promoter sequence
gcagccaggcagggtgggcgcgcgtagggggcggggccgggcgcgcggcagggcgcgagagcgcacccgcggcggcggtggcggcgactgtgggggggcggcggggaacattggctaagccgacagtggaggcttaggcaccggtggcgggcggctgcggttcctggtgctgctcggcgcgcggccagctttcggaacggaacgctcggcgtcgcgggccccgcccggaaagtttgccgtggagtcgcgacctcttggcccgcgcggcccggcatgaagcggcgttgaggagctgctgccgccgcttgccgctgccgccgccgccgcctgaggaggagctgcagcaccctgggccacgccg

SEQ ID NO: 817 - DNA, 430 bp, Artificial Sequence
  NFATc2 promoter sequence 1
cagagagaggctgcgttcagactggggcactgccatcccctccgcatcatggggtctgtggaccaaggtaactgactctcgatcccttccagccttttccgctcgctcctcccggccctttcctgctgctcccgtcccgggcagcactttcagctcccggcagaggtcggtgcgggaggcctggggaccccgctcgccctcggcgcacaggtagcggggcccgcggaggggcgcccgcgccccggccagggaagggacacttgggaaggcgactttggacaactttacgcgggggcagggaagtgtcccaggccgggattccctaggccagtctgtcgggaggattttcctctccacgggacaccgggagggattctcgctactaaccgctggctgtttaaccgtttcagcactcggcttttgacagcaa

SEQ ID NO: 818 - DNA, 64 bp, Artificial Sequence
  NFATc2 promoter sequence 2
catcatggggtctgtggaccaaggtaactgactctcgatcccttccagccttttccgctcgctc

SEQ ID NO: 819 - DNA, 12 bp, Artificial Sequence
  NFATc1 response element consensus
cattttttccat

SEQ ID NO: 820 - DNA, 8 bp, Artificial Sequence
  NFATc1 response element consensus
tttttcca

SEQ ID NO: 821 - DNA, 119 bp, Artificial Sequence
  NFAT response elements contained within the Foxp3 enhancer region
acttgaaaatgagataaatgttcacctatgttggcttctagtctcttttatggcttcattttttccatttactatagaggttaagagtgtgggtactggagccagactgtctgggacaa

SEQ ID NO: 822 - protein, 65 aa, Artificial Sequence
  N+20
SNIKFRPGSVVVQLTLAFREGTINVHDVETQFNQYKTEAASRYNLTISDVSVSDVPFPFSAQSGA

SEQ ID NO: 823 - protein, 38 aa, Artificial Sequence
  N+20/C27
SNIKFRPGSVVVQLTLAFREGTINVHDVETQFNQYKTE

SEQ ID NO: 824 - protein, 45 aa, Artificial Sequence
  N+9/C9
VQLTLAFREGTINVHDVETQFNQYKTEAASRYNLTISDVSVSDVP

SEQ ID NO: 825 - protein, 35 aa, Artificial Sequence
  C10
GTINVHDVETQFNQYKTEAASRYNLTISDVSVSDV

SEQ ID NO: 826 - DNA, 885 bp, Artificial Sequence
  NME7AB
atggaaaaaacgctggccctgattaaaccggatgcaatctccaaagctggcgaaattatcgaaattatcaacaaagcgggtttcaccatcacgaaactgaaaatgatgatgctgagccgtaaagaagccctggattttcatgtcgaccaccagtctcgcccgtttttcaatgaactgattcaattcatcaccacgggtccgattatcgcaatggaaattctgcgtgatgacgctatctgcgaatggaaacgcctgctgggcccggcaaactcaggtgttgcgcgtaccgatgccagtgaatccattcgcgctctgtttggcaccgatggtatccgtaatgcagcacatggtccggactcattcgcatcggcagctcgtgaaatggaactgtttttcccgagctctggcggttgcggtccggcaaacaccgccaaatttaccaattgtacgtgctgtattgtcaaaccgcacgcagtgtcagaaggcctgctgggtaaaattctgatggcaatccgtgatgctggctttgaaatctcggccatgcagatgttcaacatggaccgcgttaacgtcgaagaattctacgaagtttacaaaggcgtggttaccgaatatcacgatatggttacggaaatgtactccggtccgtgcgtcgcgatggaaattcagcaaaacaatgccaccaaaacgtttcgtgaattctgtggtccggcagatccggaaatcgcacgtcatctgcgtccgggtaccctgcgcgcaatttttggtaaaacgaaaatccagaacgctgtgcactgtaccgatctgccggaagacggtctgctggaagttcaatactttttcaaaattctggataatctcgagcaccaccaccaccaccactga

SEQ ID NO: 827 - protein, 294 aa, Artificial Sequence
  NME7AB
MEKTLALIKPDAISKAGEIIEIINKAGFTITKLKMMMLSRKEALDFHVDHQSRPFFNELIQFITTGPIIAMEILRDDAICEWKRLLGPANSGVARTDASESIRALFGTDGIRNAAHGPDSFASAAREMELFFPSSGGCGPANTAKFTNCTCCIVKPHAVSEGLLGKILMAIRDAGFEISAMQMFNMDRVNVEEFYEVYKGVVTEYHDMVTEMYSGPCVAMEIQQNNATKTFREFCGPADPEIARHLRPGTLRAIFGKTKIQNAVHCTDLPEDGLLEVQYFFKILDNLEHHHHHH

SEQ ID NO: 828 - DNA, 783 bp, Artificial Sequence
  Human NME7 x1
atgatgatgctttcaaggaaagaagcattggattttcatgtagatcaccagtcaagaccctttttcaatgagctgatccagtttattacaactggtcctattattgccatggagattttaagagatgatgctatatgtgaatggaaaagactgctgggacctgcaaactctggagtggcacgcacagatgcttctgaaagcattagagccctctttggaacagatggcataagaaatgcagcgcatggccctgattcttttgcttctgcggccagagaaatggagttgttttttccttcaagtggaggttgtgggccggcaaacactgctaaatttactaattgtacctgttgcattgttaaaccccatgctgtcagtgaaggactgttgggaaagatcctgatggctatccgagatgcaggttttgaaatctcagctatgcagatgttcaatatggatcgggttaatgttgaggaattctatgaagtttataaaggagtagtgaccgaatatcatgacatggtgacagaaatgtattctggcccttgtgtagcaatggagattcaacagaataatgctacaaagacatttcgagaattttgtggacctgctgatcctgaaattgcccggcatttacgccctggaactctcagagcaatctttggtaaaactaagatccagaatgctgttcactgtactgatctgccagaggatggcctattagaggttcaatacttcttcaagatcttggataatctcgagcaccaccaccaccaccactga

SEQ ID NO: 829 - protein, 260 aa, Artificial Sequence
  Human NME7 x1
MMMLSRKEALDFHVDHQSRPFFNELIQFITTGPIIAMEILRDDAICEWKRLLGPANSGVARTDASESIRALFGTDGIRNAAHGPDSFASAAREMELFFPSSGGCGPANTAKFTNCTCCIVKPHAVSEGLLGKILMAIRDAGFEISAMQMFNMDRVNVEEFYEVYKGVVTEYHDMVTEMYSGPCVAMEIQQNNATKTFREFCGPADPEIARHLRPGTLRAIFGKTKIQNAVHCTDLPEDGLLEVQYFFKILDNLEHHHHHH

SEQ ID NO: 830 - DNA, 426 bp, Artificial Sequence
  Mouse Antibody 17H6 Heavy chain: DNA sequence - Signal sequence FR1CDR1FR2CDR2FR3CDR3FR4
atgaagttgtggctgaactggattttccttgtaacacttttaaatggtatccagtgtgaggtgaagctggtggagtctggaggaggcttggtacagcctgggggttctctgagactctcctgtgcaacttctgggttcaccttcactgattactacatgagctgggtccgccagcctccaagaaaggcacttgagtggttgggttttattagaaacaaagctaatggttacacagcagagtacagtgcgtctgtgaagggtcggttcaccatctccagagatgtttcccaaaacctcctctatcttcaaatgaacatcctgagagctgaggacagtgccacttattactgtgcaaaagattactacggtagtaaccctgcctggtttgcttactggggccaagggactctggtcactgtctctgca

SEQ ID NO: 831 - protein, 142 aa, Artificial Sequence
  Mouse Antibody 17H6 Heavy chain: Amino acid sequence - Signal peptideFR1CDR1FR2CDR2FR3CDR3FR4
MKLWLNWIFLVTLLNGIQCEVKLVESGGGLVQPGGSLRLSCATSGFTFTDYYMSWVRQPPRKALEWLGFIRNKANGYTAEYSASVKGRFTISRDVSQNLLYLQMNILRAEDSATYYCAKDYYGSNPAWFAYWGQGTLVTVSA

SEQ ID NO: 832 - DNA, 90 bp, Artificial Sequence
  Mouse 17H6 heavy chain variable framework 1 (FW1) sequence
gaggtgaagctggtggagtctggaggaggcttggtacagcctgggggttctctgagactctcctgtgcaacttctgggttcaccttcact

SEQ ID NO: 833 - protein, 30 aa, Artificial Sequence
  Mouse 17H6 heavy chain variable framework 1 (FW1) sequence
EVKLVESGGGLVQPGGSLRLSCATSGFTFT

SEQ ID NO: 834 - DNA, 15 bp, Artificial Sequence
  Mouse 17H6 heavy chain variable complementarity determining regions 1 (CDR1) sequence
gattactacatgagc

SEQ ID NO: 835 - protein, 5 aa, Artificial Sequence
  Mouse 17H6 heavy chain variable complementarity determining regions 1 (CDR1) sequence
DYYMS

SEQ ID NO: 836 - DNA, 90 bp, Artificial Sequence; identical to SEQ ID NO: 832
  Mouse 17H6 heavy chain variable framework 2 (FW2) sequence

SEQ ID NO: 837 - protein, 14 aa, Artificial Sequence
  Mouse 17H6 heavy chain variable framework 2 (FW2) sequence
WVRQPPRKALEWLG

SEQ ID NO: 838 - DNA, 57 bp, Artificial Sequence
  Mouse 17H6 heavy chain variable complementarity determining regions 2 (CDR2) sequence
tttattagaaacaaagctaatggttacacagcagagtacagtgcgtctgtgaagggt

SEQ ID NO: 839 - protein, 19 aa, Artificial Sequence
  Mouse 17H6 heavy chain variable complementarity determining regions 2 (CDR2) sequence
FIRNKANGYTAEYSASVKG

SEQ ID NO: 840 - DNA, 96 bp, Artificial Sequence
  Mouse 17H6 heavy chain variable framework 3 (FW3) sequence
cggttcaccatctccagagatgtttcccaaaacctcctctatcttcaaatgaacatcctgagagctgaggacagtgccacttattactgtgcaaaa

SEQ ID NO: 841 - protein, 32 aa, Artificial Sequence
  Mouse 17H6 heavy chain variable framework 3 (FW3) sequence
RFTISRDVSQNLLYLQMNILRAEDSATYYCAK

SEQ ID NO: 842 - DNA, 36 bp, Artificial Sequence
  Mouse 17H6 heavy chain variable complementarity determining regions 3 (CDR3) sequence
gattactacggtagtaaccctgcctggtttgcttac

SEQ ID NO: 843 - DNA, 33 bp, Artificial Sequence
  Mouse 17H6 heavy chain variable framework 4 (FW4) sequence
tggggccaagggactctggtcactgtctctgca

SEQ ID NO: 844 - DNA, 393 bp, Artificial Sequence
  Mouse Antibody 17H6 Light chain: DNA sequence - Signal sequence FR1CDR1FR2CDR2FR3CDR3FR4
atgaagttgcctgtgaggctgttggtgctgatgttctggattcctgcttccaacagtgatattttgatgacccagactccactctccctgcctgtcagtcttggagatcaagcctccatctcttgcagatctagtcagagcattgtacatagtagtggaaacacctttttagaatggtacctgcagaaacctggccagtctccaaagctcctgatctacaaagtttccaaccgattttctggggtcccagacaggttcagtggcagtggatcagggatagatttcacactcaagatcagcagagtggaggctgaggatctgggagtttattactgctttcaaggttcacatgttcctttcacgttcggctcggggacaaagttggaaataaaa

SEQ ID NO: 845 - protein, 131 aa, Artificial Sequence
  Mouse Antibody 17H6 Light chain: Amino acid sequence - Signal peptideFR1CDR1FR2CDR2FR3CDR3FR4
MKLPVRLLVLMFWIPASNSDILMTQTPLSLPVSLGDQASISCRSSQSIVHSSGNTFLEWYLQKPGQSPKLLIYKVSNRFSGVPDRFSGSGSGIDFTLKISRVEAEDLGVYYCFQGSHVPFTFGSGTKLEIK

SEQ ID NO: 846 - DNA, 69 bp, Artificial Sequence
  Mouse 17H6 light chain variable framework 1 (FW1) sequence
gatattttgatgacccagactccactctccctgcctgtcagtcttggagatcaagcctccatctcttgc

SEQ ID NO: 847 - protein, 23 aa, Artificial Sequence
  Mouse 17H6 light chain variable framework 1 (FW1) sequence
DILMTQTPLSLPVSLGDQASISC

SEQ ID NO: 848 - DNA, 48 bp, Artificial Sequence
  Mouse 17H6 light chain variable complementarity determining regions 1 (CDR1) sequence
agatctagtcagagcattgtacatagtagtggaaacacctttttagaa

SEQ ID NO: 849 - protein, 16 aa, Artificial Sequence
  Mouse 17H6 light chain variable complementarity determining regions 1 (CDR1) sequence
RSSQSIVHSSGNTFLE

SEQ ID NO: 850 - DNA, 45 bp, Artificial Sequence
  Mouse 17H6 light chain variable framework 2 (FW2) sequence
tggtacctgcagaaacctggccagtctccaaagctcctgatctac

SEQ ID NO: 851 - protein, 15 aa, Artificial Sequence
  Mouse 17H6 light chain variable framework 2 (FW2) sequence
WYLQKPGQSPKLLIY

SEQ ID NO: 852 - DNA, 21 bp, Artificial Sequence
  Mouse 17H6 light chain variable complementarity determining regions 2 (CDR2) sequence
aaagtttccaaccgattttct

SEQ ID NO: 853 - protein, 7 aa, Artificial Sequence
  Mouse 17H6 light chain variable complementarity determining regions 2 (CDR2) sequence
KVSNRFS

SEQ ID NO: 854 - DNA, 96 bp, Artificial Sequence
  Mouse 17H6 light chain variable framework 3 (FW3) sequence
ggggtcccagacaggttcagtggcagtggatcagggatagatttcacactcaagatcagcagagtggaggctgaggatctgggagtttattactgc

SEQ ID NO: 855 - protein, 32 aa, Artificial Sequence
  Mouse 17H6 light chain variable framework 3 (FW3) sequence
GVPDRFSGSGSGIDFTLKISRVEAEDLGVYYC

SEQ ID NO: 856 - DNA, 27 bp, Artificial Sequence
  Mouse 17H6 light chain variable complementarity determining regions 3 (CDR3) sequence
tttcaaggttcacatgttcctttcacg

SEQ ID NO: 857 - protein, 9 aa, Artificial Sequence
  Mouse 17H6 light chain variable complementarity determining regions 3 (CDR3) sequence
FQGSHVPFT

SEQ ID NO: 858 - DNA, 30 bp, Artificial Sequence
  Mouse 17H6 light chain variable framework 4 (FW4) sequence
ttcggctcggggacaaagttggaaataaaa

SEQ ID NO: 859 - protein, 10 aa, Artificial Sequence
  Mouse 17H6 light chain variable framework 4 (FW4) sequence
FGSGTKLEIK

SEQ ID NO: 860 - DNA, 408 bp, Artificial Sequence
  Mouse antibody 39H5 Heavy chain: DNA sequence - Signal sequenceFR1CDR1FR2CDR2FR3CDR3FR4
atggcttgggtgtggaccttgctattcctgatggcagctgcccaaagtgcccaagcacagatccagttggtgcagtctggacctgagctgaagaagcctggagagacagtcaagatctcctgcaaggcttctgggtataccttcacaaactatggaatgaactgggtgaagcaggctccaggaaagggtttaaagtggatgggctggataaacacctacactggagagccaacatatgttggtgacttcaagggacggtttgccttctctttggagacctctgccagcactgcctatttgcagatcaacaacctcaaaaatgaggacacggctacatatttttgtgttagaggtatccacggctacgtggactactggggccaaggcaccactctcacagtctcctca

SEQ ID NO: 861 - protein, 136 aa, Artificial Sequence
  Mouse antibody 39H5 Heavy chain: Amino acid sequence - Signal peptideFR1CDR1FR2CDR2FR3CDR3FR4
MAWVWTLLFLMAAAQSAQAQIQLVQSGPELKKPGETVKISCKASGYTFTNYGMNWVKQAPGKGLKWMGWINTYTGEPTYVGDFKGRFAFSLETSASTAYLQINNLKNEDTATYFCVRGIHGYVDYWGQGTTLTVSS

SEQ ID NO: 862 - DNA, 90 bp, Artificial Sequence
  Mouse antibody 39H5 heavy chain variable framework 1 (FW1) sequence
cagatccagttggtgcagtctggacctgagctgaagaagcctggagagacagtcaagatctcctgcaaggcttctgggtataccttcaca

SEQ ID NO: 863 - protein, 30 aa, Artificial Sequence
  Mouse antibody 39H5 heavy chain variable framework 1 (FW1) sequence
QIQLVQSGPELKKPGETVKISCKASGYTFT

SEQ ID NO: 864 - DNA, 15 bp, Artificial Sequence
  Mouse antibody 39H5 heavy chain variable complementarity determining regions 1 (CDR1) sequence
aactatggaatgaac

SEQ ID NO: 865 - protein, 5 aa, Artificial Sequence
  Mouse antibody 39H5 heavy chain variable complementarity determining regions 1 (CDR1) sequence
NYGMN

SEQ ID NO: 866 - DNA, 42 bp, Artificial Sequence
  Mouse antibody 39H5 heavy chain variable framework 2 (FW2) sequence
tgggtgaagcaggctccaggaaagggtttaaagtggatgggc

SEQ ID NO: 867 - protein, 14 aa, Artificial Sequence
  Mouse antibody 39H5 heavy chain variable framework 2 (FW2) sequence
WVKQAPGKGLKWMG

SEQ ID NO: 868 - DNA, 51 bp, Artificial Sequence
  Mouse antibody 39H5 heavy chain variable complementarity determining regions 2 (CDR2) sequence
tggataaacacctacactggagagccaacatatgttggtgacttcaaggga

SEQ ID NO: 869 - protein, 17 aa, Artificial Sequence
  Mouse antibody 39H5 heavy chain variable complementarity determining regions 2 (CDR2) sequence
WINTYTGEPTYVGDFKG

SEQ ID NO: 870 - DNA, 96 bp, Artificial Sequence
  Mouse antibody 39H5 heavy chain variable framework 3 (FW3) sequence
cggtttgccttctctttggagacctctgccagcactgcctatttgcagatcaacaacctcaaaaatgaggacacggctacatatttttgtgttaga

SEQ ID NO: 871 - protein, 32 aa, Artificial Sequence
  Mouse antibody 39H5 heavy chain variable framework 3 (FW3) sequence
RFAFSLETSASTAYLQINNLKNEDTATYFCVR

SEQ ID NO: 872 - DNA, 24 bp, Artificial Sequence
  Mouse antibody 39H5 heavy chain variable complementarity determining regions 3 (CDR3) sequence
ggtatccacggctacgtggactac

SEQ ID NO: 873 - protein, 8 aa, Artificial Sequence
  Mouse antibody 39H5 heavy chain variable complementarity determining regions 3 (CDR3) sequence
GIHGYVDY

SEQ ID NO: 874 - DNA, 33 bp, Artificial Sequence
  Mouse antibody 39H5 heavy chain variable framework 4 (FW4) sequence
tggggccaaggcaccactctcacagtctcctca

SEQ ID NO: 875 - protein, 11 aa, Artificial Sequence
  Mouse antibody 39H5 heavy chain variable framework 4 (FW4) sequence
WGQGTTLTVSS

SEQ ID NO: 876 - DNA, 393 bp, Artificial Sequence
  Mouse antibody 39H5 Light chain: DNA sequence - Signal sequenceFR1CDR1FR2CDR2FR3CDR3FR4
atgaagttgcctgttaggctgttggtgctgatgttctggattcctgcttccagcagtgatgttttgatgacccaaactccactctccctgcctgtcagtcttggagatcaagcctccatctcttgcagatctagtcagagcattgtacatagaaatggaaacacctatttagaatggtacctgcagaaaccaggccagtctccaaagctcctgatctacaaagtttccaaccgattttctggggtcccagacaggttcagtggcagtggatcagggacagatttcacactcaagatcagcagagtggaggctgaggatctgggagtttattactgctttcaaggttcacatcttccgtggacgttcggtggaggcaccaagctggaaatcaaa

SEQ ID NO: 877 - protein, 131 aa, Artificial Sequence
  Mouse antibody 39H5 Light chain: Amino acid sequence - Signal peptideFR1CDR1FR2CDR2FR3CDR3FR4
MKLPVRLLVLMFWIPASSSDVLMTQTPLSLPVSLGDQASISCRSSQSIVHRNGNTYLEWYLQKPGQSPKLLIYKVSNRFSGVPDRFSGSGSGTDFTLKISRVEAEDLGVYYCFQGSHLPWTFGGGTKLEIK

SEQ ID NO: 878 - DNA, 69 bp, Artificial Sequence; identical to SEQ ID NO: 460
  Mouse antibody 39H5 light chain variable framework 1 (FW1) sequence

SEQ ID NO: 879 - protein, 23 aa, Artificial Sequence
  Mouse antibody 39H5 light chain variable framework 1 (FW1) sequence
DVLMTQTPLSLPVSLGDQASISC

SEQ ID NO: 880 - DNA, 48 bp, Artificial Sequence
  Mouse antibody 39H5 light chain variable complementarity determining regions 1 (CDR1) sequence
agatctagtcagagcattgtacatagaaatggaaacacctatttagaa

SEQ ID NO: 881 - protein, 16 aa, Artificial Sequence
  Mouse antibody 39H5 light chain variable complementarity determining regions 1 (CDR1) sequence
RSSQSIVHRNGNTYLE

SEQ ID NO: 882 - DNA, 45 bp, Artificial Sequence; identical to SEQ ID NO: 464
  Mouse antibody 39H5 light chain variable framework 2 (FW2) sequence

SEQ ID NO: 883 - protein, 15 aa, Artificial Sequence
  Mouse antibody 39H5 light chain variable framework 2 (FW2) sequence
WYLQKPGQSPKLLIY

SEQ ID NO: 884 - DNA, 21 bp, Artificial Sequence
  Mouse antibody 39H5 light chain variable complementarity determining regions 2 (CDR2) sequence
aaagtttccaaccgattttct

SEQ ID NO: 885 - protein, 7 aa, Artificial Sequence
  Mouse antibody 39H5 light chain variable complementarity determining regions 2 (CDR2) sequence
KVSNRFS

SEQ ID NO: 886 - DNA, 96 bp, Artificial Sequence
  Mouse antibody 39H5 light chain variable framework 3 (FW3) sequence
ggggtcccagacaggttcagtggcagtggatcagggacagatttcacactcaagatcagcagagtggaggctgaggatctgggagtttattactgc

SEQ ID NO: 887 - protein, 32 aa, Artificial Sequence
  Mouse antibody 39H5 light chain variable framework 3 (FW3) sequence
GVPDRFSGSGSGTDFTLKISRVEAEDLGVYYC

SEQ ID NO: 888 - DNA, 27 bp, Artificial Sequence
  Mouse antibody 39H5 light chain variable complementarity determining regions 3 (CDR3) sequence
tttcaaggttcacatcttccgtggacg

SEQ ID NO: 889 - protein, 9 aa, Artificial Sequence
  Mouse antibody 39H5 light chain variable complementarity determining regions 3 (CDR3) sequence
FQGSHLPWT

SEQ ID NO: 890 - DNA, 30 bp, Artificial Sequence
  Mouse antibody 39H5 light chain variable framework 4 (FW4) sequence
ttcggtggaggcaccaagctggaaatcaaa

SEQ ID NO: 891 - protein, 10 aa, Artificial Sequence
  Mouse antibody 39H5 light chain variable framework 4 (FW4) sequence
FGGGTKLEIK

SEQ ID NO: 892 - DNA, 411 bp, Artificial Sequence
  Antibody 3C5 Heavy chain: DNA sequence - Signal sequenceFR1CDR1FR2CDR2FR3CDR3FR4
atggcttgggtgtggaccttgctgttcctgatggcagctgcccaaagtgcccaagcacagatccagttggtgcagtctggacctgagctgaagaagcctggagagacagtcaagatctcctgcaaggcttctgggtataccttcacaaactatggaatgaactgggtgaagcaggctccaggaaagggtttaaagtggatgggctggataaacacctacactggaaagccaacatatgctgatgacttcaagggacggtttgccttctctttggagacctctgccagcactgcctatttgcagatcaacaacctcaaaaatgaggacacggctacatatttctgtgcaagagggggactagatggttactacggctactggggccaaggcaccactctcacagtctcctca

SEQ ID NO: 893 - protein, 137 aa, Artificial Sequence
  Antibody 3C5 Heavy chain: Amino acid sequence - Signal peptideFR1CDR1FR2CDR2FR3CDR3FR4
MAWVWTLLFLMAAAQSAQAQIQLVQSGPELKKPGETVKISCKASGYTFTNYGMNWVKQAPGKGLKWMGWINTYTGKPTYADDFKGRFAFSLETSASTAYLQINNLKNEDTATYFCARGGLDGYYGYWGQGTTLTVSS

SEQ ID NO: 894 - DNA, 90 bp, Artificial Sequence; identical to SEQ ID NO: 862
  Mouse antibody 3C5 heavy chain variable framework 1 (FW1) sequence

SEQ ID NO: 895 - protein, 30 aa, Artificial Sequence; identical to SEQ ID NO: 863
  Mouse antibody 3C5 heavy chain variable framework 1 (FW1) sequence

SEQ ID NO: 896 - DNA, 15 bp, Artificial Sequence
  Mouse antibody 3C5 heavy chain variable complementarity determining regions 1 (CDR1) sequence
aactatggaatgaac

SEQ ID NO: 897 - protein, 5 aa, Artificial Sequence
  Mouse antibody 3C5 heavy chain variable complementarity determining regions 1 (CDR1) sequence
NYGMN

SEQ ID NO: 898 - DNA, 42 bp, Artificial Sequence; identical to SEQ ID NO: 866
  Mouse antibody 3C5 heavy chain variable framework 2 (FW2) sequence

SEQ ID NO: 899 - protein, 14 aa, Artificial Sequence
  Mouse antibody 3C5 heavy chain variable framework 2 (FW2) sequence
WVKQAPGKGLKWMG

SEQ ID NO: 900 - DNA, 51 bp, Artificial Sequence
  Mouse antibody 3C5 heavy chain variable complementarity determining regions 2 (CDR2) sequence
tggataaacacctacactggaaagccaacatatgctgatgacttcaaggga

SEQ ID NO: 901 - protein, 17 aa, Artificial Sequence
  Mouse antibody 3C5 heavy chain variable complementarity determining regions 2 (CDR2) sequence
WINTYTGKPTYADDFKG

SEQ ID NO: 902 - DNA, 96 bp, Artificial Sequence
  Mouse antibody 3C5 heavy chain variable framework 3 (FW3) sequence
cggtttgccttctctttggagacctctgccagcactgcctatttgcagatcaacaacctcaaaaatgaggacacggctacatatttctgtgcaaga

SEQ ID NO: 903 - protein, 32 aa, Artificial Sequence
  Mouse antibody 3C5 heavy chain variable framework 3 (FW3) sequence
RFAFSLETSASTAYLQINNLKNEDTATYFCAR

SEQ ID NO: 904 - DNA, 27 bp, Artificial Sequence
  Mouse antibody 3C5 heavy chain variable complementarity determining regions 3 (CDR3) sequence
gggggactagatggttactacggctac

SEQ ID NO: 905 - protein, 9 aa, Artificial Sequence
  Mouse antibody 3C5 heavy chain variable complementarity determining regions 3 (CDR3) sequence
GGLDGYYGY

SEQ ID NO: 906 - DNA, 33 bp, Artificial Sequence; identical to SEQ ID NO: 874
  Mouse antibody 3C5 heavy chain variable framework 4 (FW4) sequence

SEQ ID NO: 907 - protein, 11 aa, Artificial Sequence
  Mouse antibody 3C5 heavy chain variable framework 4 (FW4) sequence
WGQGTTLTVSS

SEQ ID NO: 908 - DNA, 393 bp, Artificial Sequence
  Antibody 3C5 Light chain: DNA sequence (393 bp) - Signal sequenceFR1CDR1FR2CDR2FR3CDR3FR4
atgagtcctgcccagttcctgtttctgctagtgctctcgattcaggaaaccaacggtgatgttgtgatggctcagaccccactcactttgtcggttaccattggacaaccagcctccatctcttgcaaatcaagtcagagcctcttacatagtaaaggaaagacatatttgaattggttattacagaggccaggccagtctccaaagctcctaatctatctggtgtctaaactggaatctggagtccctgacaggttcagtggcagtggatcagggacagatttcacactgaaaatcagcagagtggaggctgaagatttgggagtttattactgcttgcaaactacacattttccgtggacgttcggtggaggcaccaagctggaaatcaaa

SEQ ID NO: 909 - protein, 131 aa, Artificial Sequence
  Antibody 3C5 Light chain: Amino acid sequence (131 aa) - Signal peptideFR1CDR1FR2CDR2FR3CDR3FR4
MSPAQFLFLLVLSIQETNGDVVMAQTPLTLSVTIGQPASISCKSSQSLLHSKGKTYLNWLLQRPGQSPKLLIYLVSKLESGVPDRFSGSGSGTDFTLKISRVEAEDLGVYYCLQTTHFPWTFGGGTKLEIK

SEQ ID NO: 910 - DNA, 69 bp, Artificial Sequence
  Mouse antibody 3C5 light chain variable framework 1 (FW1) sequence
gatgttgtgatggctcagaccccactcactttgtcggttaccattggacaaccagcctccatctcttgc

SEQ ID NO: 911 - protein, 23 aa, Artificial Sequence
  Mouse antibody 3C5 light chain variable framework 1 (FW1) sequence
DVVMAQTPLTLSVTIGQPASISC

SEQ ID NO: 912 - DNA, 48 bp, Artificial Sequence
  Mouse antibody 39H5 light chain variable complementarity determining regions 1 (CDR1) sequence
aaatcaagtcagagcctcttacatagtaaaggaaagacatatttgaat

SEQ ID NO: 913 - protein, 16 aa, Artificial Sequence
  Mouse antibody 39H5 light chain variable complementarity determining regions 1 (CDR1) sequence
KSSQSLLHSKGKTYLN

SEQ ID NO: 914 - DNA, 45 bp, Artificial Sequence
  Mouse antibody 3C5 light chain variable framework 2 (FW2) sequence
tggttattacagaggccaggccagtctccaaagctcctaatctat

SEQ ID NO: 915 - protein, 15 aa, Artificial Sequence
  Mouse antibody 3C5 light chain variable framework 2 (FW2) sequence
WLLQRPGQSPKLLIY

SEQ ID NO: 916 - DNA, 21 bp, Artificial Sequence
  Mouse antibody 3C5 light chain variable complementarity determining regions 2 (CDR2) sequence
ctggtgtctaaactggaatct

SEQ ID NO: 917 - protein, 7 aa, Artificial Sequence
  Mouse antibody 3C5 light chain variable complementarity determining regions 2 (CDR2) sequence
LVSKLES

SEQ ID NO: 918 - DNA, 96 bp, Artificial Sequence
  Mouse antibody 3C5 light chain variable framework 3 (FW3) sequence
ggagtccctgacaggttcagtggcagtggatcagggacagatttcacactgaaaatcagcagagtggaggctgaagatttgggagtttattactgc

SEQ ID NO: 919 - protein, 32 aa, Artificial Sequence; identical to SEQ ID NO: 887
  Mouse antibody 3C5 light chain variable framework 3 (FW3) sequence

SEQ ID NO: 920 - DNA, 27 bp, Artificial Sequence
  Mouse antibody 3C5 light chain variable complementarity determining regions 3 (CDR3) sequence
ttgcaaactacacattttccgtggacg

SEQ ID NO: 921 - protein, 9 aa, Artificial Sequence
  Mouse antibody 3C5 light chain variable complementarity determining regions 3 (CDR3) sequence
LQTTHFPWT

SEQ ID NO: 922 - DNA, 30 bp, Artificial Sequence; identical to SEQ ID NO: 890
  Mouse antibody 3C5 light chain variable framework 4 (FW4) sequence

SEQ ID NO: 923 - protein, 10 aa, Artificial Sequence
  Mouse antibody 3C5 light chain variable framework 4 (FW4) sequence
FGGGTKLEIK

SEQ ID NO: 924 - DNA, 420 bp, Artificial Sequence
  Mouse antibody 8A9 Heavy chain: DNA sequence (420 bp) - Signal sequenceFR1CDR1FR2CDR2FR3CDR3FR4
atgaagttgtggctgaactggattttccttgtaacacttttaaatggtatccagtgtgaggtggagctggtggagtctggaggaggcttggtacagcctgggggttctctgagactctcctgtgcaacttctgggttcaccttcactgatcactacatgagctgggtccgccagcctccaggaaaggcacttgagtggttgggatttattagaaacaaagctaatggttacacaacagagtacagtgcatctgtgaagggtcggttcaccatctccagagataattcccaaagcatcctctatcttcaaatgaaaaccctgagaactgaggacagtgccacttattactgtgcaagaccttctgactgggactcctggtttgcttactggggccaagggactctggtcactgtctctgca

SEQ ID NO: 925 - protein, 140 aa, Artificial Sequence
  Mouse antibody 8A9 Heavy chain: Amino acid sequence (140 aa) - Signal peptideFR1CDR1FR2CDR2FR3CDR3FR4
MKLWLNWIFLVTLLNGIQCEVELVESGGGLVQPGGSLRLSCATSGFTFTDHYMSWVRQPPGKALEWLGFIRNKANGYTTEYSASVKGRFTISRDNSQSILYLQMKTLRTEDSATYYCARPSDWDSWFAYWGQGTLVTVSA

SEQ ID NO: 926 - DNA, 90 bp, Artificial Sequence
  Mouse antibody 8A9 heavy chain variable framework 1 (FW1) sequence
gaggtggagctggtggagtctggaggaggcttggtacagcctgggggttctctgagactctcctgtgcaacttctgggttcaccttcact

SEQ ID NO: 927 - protein, 30 aa, Artificial Sequence
  Mouse antibody 8A9 heavy chain variable framework 1 (FW1) sequence
EVELVESGGGLVQPGGSLRLSCATSGFTFT

SEQ ID NO: 928 - DNA, 15 bp, Artificial Sequence
  Mouse antibody 8A9 heavy chain variable complementarity determining regions 1 (CDR1) sequence
gatcactacatgagc

SEQ ID NO: 929 - protein, 5 aa, Artificial Sequence
  Mouse antibody 8A9 heavy chain variable complementarity determining regions 1 (CDR1) sequence
DHYMS

SEQ ID NO: 930 - DNA, 42 bp, Artificial Sequence
  Mouse antibody 8A9 heavy chain variable framework 2 (FW2) sequence
tgggtccgccagcctccaggaaaggcacttgagtggttggga

SEQ ID NO: 931 - protein, 14 aa, Artificial Sequence
  Mouse antibody 8A9 heavy chain variable framework 2 (FW2) sequence
WVRQPPGKALEWLG

SEQ ID NO: 932 - DNA, 57 bp, Artificial Sequence
  Mouse antibody 8A9 heavy chain variable complementarity determining regions 2 (CDR2) sequence
tttattagaaacaaagctaatggttacacaacagagtacagtgcatctgtgaagggt

SEQ ID NO: 933 - protein, 19 aa, Artificial Sequence
  Mouse antibody 8A9 heavy chain variable complementarity determining regions 2 (CDR2) sequence
FIRNKANGYTTEYSASVKG

SEQ ID NO: 934 - DNA, 96 bp, Artificial Sequence
  Mouse antibody 8A9 heavy chain variable framework 3 (FW3) sequence
cggttcaccatctccagagataattcccaaagcatcctctatcttcaaatgaaaaccctgagaactgaggacagtgccacttattactgtgcaaga

SEQ ID NO: 935 - protein, 32 aa, Artificial Sequence
  Mouse antibody 8A9 heavy chain variable framework 3 (FW3) sequence
RFTISRDNSQSILYLQMKTLRTEDSATYYCAR

SEQ ID NO: 936 - DNA, 30 bp, Artificial Sequence
  Mouse antibody 8A9 heavy chain variable complementarity determining regions 3 (CDR3) sequence
ccttctgactgggactcctggtttgcttac

SEQ ID NO: 937 - protein, 10 aa, Artificial Sequence
  Mouse antibody 8A9 heavy chain variable complementarity determining regions 3 (CDR3) sequence
PSDWDSWFAY

SEQ ID NO: 938 - DNA, 33 bp, Artificial Sequence; identical to SEQ ID NO: 843
  Mouse antibody 8A9 heavy chain variable framework 4 (FW4) sequence

SEQ ID NO: 939 - protein, 11 aa, Artificial Sequence
  Mouse antibody 8A9 heavy chain variable framework 4 (FW4) sequence
WGQGTLVTVSA

SEQ ID NO: 940 - DNA, 393 bp, Artificial Sequence
  Mouse antibody 8A9 Light chain: DNA sequence (393 bp) - Signal sequenceFR1CDR1FR2CDR2FR3CDR3FR4
atgaagttgcctgttaggctgttggtgctgatgttctggattcctgcttccagcagtgatgttttgatgacccaaactccactctccctgcctgtcagtcttggtgatcaagcctccatctcttgcagatctagtcagagcattgtacatagtaatggcaacacctatttagattggtacttgcagaaaccaggccagtctccaaagctcctgatctacagagtttccaaccgattttctggggtcccagacaggttcagtggcagtggatcagggacagatttcacactcaagatcagcagagtggaggctgaggatctgggactttattactgttttcaaggttcacatgttccgtgggcgttcggtggaggcaccaagctggaaatcaaa

SEQ ID NO: 941 - protein, 131 aa, Artificial Sequence
  Mouse antibody 8A9 Light chain: Amino acid sequence (131 aa) - Signal peptideFR1CDR1FR2CDR2FR3CDR3FR4
MKLPVRLLVLMFWIPASSSDVLMTQTPLSLPVSLGDQASISCRSSQSIVHSNGNTYLDWYLQKPGQSPKLLIYRVSNRFSGVPDRFSGSGSGTDFTLKISRVEAEDLGLYYCFQGSHVPWAFGGGTKLEIK

SEQ ID NO: 942 - DNA, 69 bp, Artificial Sequence
  Mouse antibody 8A9 light chain variable framework 1 (FW1) sequence
gatgttttgatgacccaaactccactctccctgcctgtcagtcttggtgatcaagcctccatctcttgc

SEQ ID NO: 943 - protein, 23 aa, Artificial Sequence
  Mouse antibody 8A9 light chain variable framework 1 (FW1) sequence
DVLMTQTPLSLPVSLGDQASISC

SEQ ID NO: 944 - DNA, 48 bp, Artificial Sequence
  Mouse antibody 8A9 light chain variable complementarity determining regions 1 (CDR1) sequence
agatctagtcagagcattgtacatagtaatggcaacacctatttagat

SEQ ID NO: 945 - protein, 16 aa, Artificial Sequence
  Mouse antibody 8A9 light chain variable complementarity determining regions 1 (CDR1) sequence
RSSQSIVHSNGNTYLD

SEQ ID NO: 946 - DNA, 45 bp, Artificial Sequence
  Mouse antibody 8A9 light chain variable framework 2 (FW2) sequence
tggtacttgcagaaaccaggccagtctccaaagctcctgatctac

SEQ ID NO: 947 - protein, 15 aa, Artificial Sequence
  Mouse antibody 8A9 light chain variable framework 2 (FW2) sequence
WYLQKPGQSPKLLIY

SEQ ID NO: 948 - DNA, 21 bp, Artificial Sequence
  Mouse antibody 8A9 light chain variable complementarity determining regions 2 (CDR2) sequence
agagtttccaaccgattttct

SEQ ID NO: 949 - protein, 7 aa, Artificial Sequence
  Mouse antibody 8A9 light chain variable complementarity determining regions 2 (CDR2) sequence
RVSNRFS

SEQ ID NO: 950 - DNA, 96 bp, Artificial Sequence
  Mouse antibody 8A9 light chain variable framework 3 (FW3) sequence
ggggtcccagacaggttcagtggcagtggatcagggacagatttcacactcaagatcagcagagtggaggctgaggatctgggactttattactgt

SEQ ID NO: 951 - protein, 32 aa, Artificial Sequence
  Mouse antibody 8A9 light chain variable framework 3 (FW3) sequence
GVPDRFSGSGSGTDFTLKISRVEAEDLGLYYC

SEQ ID NO: 952 - DNA, 27 bp, Artificial Sequence
  Mouse antibody 8A9 light chain variable complementarity determining regions 3 (CDR3) sequence
tttcaaggttcacatgttccgtgggcg

SEQ ID NO: 953 - protein, 9 aa, Artificial Sequence
  Mouse antibody 8A9 light chain variable complementarity determining regions 3 (CDR3) sequence
FQGSHVPWA

SEQ ID NO: 954 - DNA, 30 bp, Artificial Sequence; identical to SEQ ID NO: 890
  Mouse antibody 8A9 light chain variable framework 4 (FW4) sequence

SEQ ID NO: 955 - protein, 10 aa, Artificial Sequence
  Mouse antibody 8A9 light chain variable framework 4 (FW4) sequence
FGGGTKLEIK

SEQ ID NO: 956 - DNA, 399 bp, Artificial Sequence
  Mouse antibody 18G12 Heavy chain: DNA sequence (399 bp) - Signal sequenceFR1CDR1FR2CDR2FR3CDR3FR4
atgggatggagctatatcatcctctttttggtcgcaacagctacaggtgtccactcccaggtccaactgcagcagtctggggctgaactggtgaagcctggggcttcagtgaagttgtcctgcaaggcttctggctacaccttcaccggctactttttgtactgggtgaagcagaggcctggacaaggccttgagtggattggggggattaatcctgacaatggtggtattgacttcaatgagaagttcaggaacaaggccacactgactgtagacaaatcctccagcacagcctacatgcaactcagcagcctgacatctgaggactctgcggtctattattgtacattactaatagggaactattggggccaaggcaccactctcacagtctcctca

SEQ ID NO: 957 - protein, 133 aa, Artificial Sequence
  Mouse antibody 18G12 Heavy chain: Amino acid sequence (133 aa) - Signal peptideFR1CDR1FR2CDR2FR3CDR3FR4
MGWSYIILFLVATATGVHSQVQLQQSGAELVKPGASVKLSCKASGYTFTGYFLYWVKQRPGQGLEWIGGINPDNGGIDFNEKFRNKATLTVDKSSSTAYMQLSSLTSEDSAVYYCTLLIGNYWGQGTTLTVSS

SEQ ID NO: 958 - DNA, 90 bp, Artificial Sequence
  Mouse antibody 18G12 heavy chain variable framework 1 (FW1) sequence
caggtccaactgcagcagtctggggctgaactggtgaagcctggggcttcagtgaagttgtcctgcaaggcttctggctacaccttcacc

SEQ ID NO: 959 - protein, 30 aa, Artificial Sequence
  Mouse antibody 18G12 heavy chain variable framework 1 (FW1) sequence
QVQLQQSGAELVKPGASVKLSCKASGYTFT

SEQ ID NO: 960 - DNA, 15 bp, Artificial Sequence
  Mouse antibody 39H5 heavy chain variable complementarity determining regions 1 (CDR1) sequence
ggctactttttgtac

SEQ ID NO: 961 - protein, 5 aa, Artificial Sequence
  Mouse antibody 39H5 heavy chain variable complementarity determining regions 1 (CDR1) sequence
GYFLY

SEQ ID NO: 962 - DNA, 42 bp, Artificial Sequence
  Mouse antibody 18G12 heavy chain variable framework 2 (FW2) sequence
tgggtgaagcagaggcctggacaaggccttgagtggattggg

SEQ ID NO: 963 - protein, 14 aa, Artificial Sequence
  Mouse antibody 18G12 heavy chain variable framework 2 (FW2) sequence
WVKQRPGQGLEWIG

SEQ ID NO: 964 - DNA, 51 bp, Artificial Sequence
  Mouse antibody 18G12 heavy chain variable complementarity determining regions 2 (CDR2) sequence
gggattaatcctgacaatggtggtattgacttcaatgagaagttcaggaac

SEQ ID NO: 965 - protein, 17 aa, Artificial Sequence
  Mouse antibody 18G12 heavy chain variable complementarity determining regions 2 (CDR2) sequence
GINPDNGGIDFNEKFRN

SEQ ID NO: 966 - DNA, 96 bp, Artificial Sequence
  Mouse antibody 18G12 heavy chain variable framework 3 (FW3) sequence
aaggccacactgactgtagacaaatcctccagcacagcctacatgcaactcagcagcctgacatctgaggactctgcggtctattattgtacatta

SEQ ID NO: 967 - protein, 32 aa, Artificial Sequence
  Mouse antibody 18G12 heavy chain variable framework 3 (FW3) sequence
KATLTVDKSSSTAYMQLSSLTSEDSAVYYCTL

SEQ ID NO: 968 - DNA, 15 bp, Artificial Sequence
  Mouse antibody 18G12 heavy chain variable complementarity determining regions 3 (CDR3) sequence
ctaatagggaactat

SEQ ID NO: 969 - protein, 5 aa, Artificial Sequence
  Mouse antibody 18G12 heavy chain variable complementarity determining regions 3 (CDR3) sequence
LIGNY

SEQ ID NO: 970 - DNA, 33 bp, Artificial Sequence; identical to SEQ ID NO: 874
  Mouse antibody 18G12 heavy chain variable framework 4 (FW4) sequence

SEQ ID NO: 971 - protein, 11 aa, Artificial Sequence
  Mouse antibody 18G12 heavy chain variable framework 4 (FW4) sequence
WGQGTTLTVSS

SEQ ID NO: 972 - DNA, 393 bp, Artificial Sequence
  Mouse antibody 18G12 Light chain: DNA sequence (393 bp) - Signal sequenceFR1CDR1FR2CDR2FR3CDR3FR4
atgagtcctgcccagttcctgtttctgttagtgctctggattcgggaaaccaatggtgatgttgtgatgacccagactccactcactttgtcggtaaccattggacagccagcctccatctcttgcaagtcaagtcagagcctcttacatagtgatggaaagacatatttgatttggttgttacagaggccaggccagtctccaaagcgcctaatctatctggtgtctaaactggactctggagtccctgacaggttcactggcagtggatcagggacagatttcacactgaaaatcagcagagtggaggctgaggatttgggagtttatttttgctgtcaaggtacacattttccgtggacgttcggtggaggcaccatgctggaaatcaaa

SEQ ID NO: 973 - protein, 131 aa, Artificial Sequence
  Mouse antibody 18G12 Light chain: Amino acid sequence (131 aa) - Signal peptideFR1CDR1FR2CDR2FR3CDR3FR4
MSPAQFLFLLVLWIRETNGDVVMTQTPLTLSVTIGQPASISCKSSQSLLHSDGKTYLIWLLQRPGQSPKRLIYLVSKLDSGVPDRFTGSGSGTDFTLKISRVEAEDLGVYFCCQGTHFPWTFGGGTMLEIK

SEQ ID NO: 974 - DNA, 69 bp, Artificial Sequence
  Mouse antibody 18G12 light chain variable framework 1 (FW1) sequence
gatgttgtgatgacccagactccactcactttgtcggtaaccattggacagccagcctccatctcttgc

SEQ ID NO: 975 - protein, 23 aa, Artificial Sequence
  Mouse antibody 18G12 light chain variable framework 1 (FW1) sequence
DVVMTQTPLTLSVTIGQPASISC

SEQ ID NO: 976 - DNA, 48 bp, Artificial Sequence
  Mouse antibody 18G12 light chain variable complementarity determining regions 1 (CDR1) sequence
aagtcaagtcagagcctcttacatagtgatggaaagacatatttgatt

SEQ ID NO: 977 - protein, 16 aa, Artificial Sequence
  Mouse antibody 18G12 light chain variable complementarity determining regions 1 (CDR1) sequence
KSSQSLLHSDGKTYLI

SEQ ID NO: 978 - DNA, 45 bp, Artificial Sequence
  Mouse antibody 18G12 light chain variable framework 2 (FW2) sequence
tggttgttacagaggccaggccagtctccaaagcgcctaatctat

SEQ ID NO: 979 - protein, 15 aa, Artificial Sequence
  Mouse antibody 18G12 light chain variable framework 2 (FW2) sequence
WLLQRPGQSPKRLIY

SEQ ID NO: 980 - DNA, 21 bp, Artificial Sequence
  Mouse antibody 18G12 light chain variable complementarity determining regions 2 (CDR2) sequence
ctggtgtctaaactggactct

SEQ ID NO: 981 - protein, 7 aa, Artificial Sequence
  Mouse antibody 18G12 light chain variable complementarity determining regions 2 (CDR2) sequence
LVSKLDS

SEQ ID NO: 982 - DNA, 96 bp, Artificial Sequence
  Mouse antibody 18G12 light chain variable framework 3 (FW3) sequence
ggagtccctgacaggttcactggcagtggatcagggacagatttcacactgaaaatcagcagagtggaggctgaggatttgggagtttatttttgc

SEQ ID NO: 983 - protein, 32 aa, Artificial Sequence
  Mouse antibody 18G12 light chain variable framework 3 (FW3) sequence
GVPDRFTGSGSGTDFTLKISRVEAEDLGVYFC

SEQ ID NO: 984 - DNA, 27 bp, Artificial Sequence
  Mouse antibody 18G12 light chain variable complementarity determining regions 3 (CDR3) sequence
tgtcaaggtacacattttccgtggacg

SEQ ID NO: 985 - protein, 9 aa, Artificial Sequence
  Mouse antibody 18G12 light chain variable complementarity determining regions 3 (CDR3) sequence
CQGTHFPWT

SEQ ID NO: 986 - DNA, 30 bp, Artificial Sequence
  Mouse antibody 18G12 light chain variable framework 4 (FW4) sequence
ttcggtggaggcaccatgctggaaatcaaa

SEQ ID NO: 987 - protein, 10 aa, Artificial Sequence
  Mouse antibody 18G12 light chain variable framework 4 (FW4) sequence
FGGGTMLEIK

SEQ ID NO: 988 - DNA, 416 bp, Artificial Sequence
  Mouse antibody 20A10 Heavy chain: DNA sequence (417 bp) - Signal sequenceFR1CDR1FR2CDR2FR3CDR3FR4
atgaacttcgggttcagcttgattttccttgtccttgttttaaaaggtgtccagtgtgaagtgatgctggtggagtctgggggaggcttagtgaagcctggagggtccctgaaactctcctgtcagcctctggattcactttcagtacctatgccatgtcttggattcgccagactccagagaagaggctggagtgggtcgcatccattggtcgtgctggttccacctactattcagacagtgtgaagggccgattcaccatctccagagataatgtccggaacatcctgtacctgcaaatgagcagtctgaggtctgaggacacggccatgtattactgtgctagaggcccgatctacaatgattacgacgagtttgcttactggggccaagggactctggtcactgtctctgca

SEQ ID NO: 989 - protein, 139 aa, Artificial Sequence
  Mouse antibody 20A10 Heavy chain: Amino acid sequence (139 aa) - Signal peptideFR1CDR1FR2CDR2FR3CDR3FR4
MNFGFSLIFLVLVLKGVQCEVMLVESGGGLVKPGGSLKLSCAASGFTFSTYAMSWIRQTPEKRLEWVASIGRAGSTYYSDSVKGRFTISRDNVRNILYLQMSSLRSEDTAMYYCARGPIYNDYDEFAYWGQGTLVTVSA

SEQ ID NO: 990 - DNA, 90 bp, Artificial Sequence
  Mouse antibody 20A10 heavy chain variable framework 1 (FW1) sequence
gaagtgatgctggtggagtctgggggaggcttagtgaagcctggagggtccctgaaactctcctgtgcagcctctggattcactttcagt

SEQ ID NO: 991 - protein, 30 aa, Artificial Sequence
  Mouse antibody 20A10 heavy chain variable framework 1 (FW1) sequence
EVMLVESGGGLVKPGGSLKLSCAASGFTFS

SEQ ID NO: 992 - DNA, 15 bp, Artificial Sequence
  Mouse antibody 20A10 heavy chain variable complementarity determining regions 1 (CDR1) sequence
acctatgccatgtct

SEQ ID NO: 993 - protein, 5 aa, Artificial Sequence
  Mouse antibody 20A10 heavy chain variable complementarity determining regions 1 (CDR1) sequence
TYAMS

SEQ ID NO: 994 - DNA, 42 bp, Artificial Sequence
  Mouse antibody 20A10 heavy chain variable framework 2 (FW2) sequence
tggattcgccagactccagagaagaggctggagtgggtcgca

SEQ ID NO: 995 - protein, 14 aa, Artificial Sequence
  Mouse antibody 20A10 heavy chain variable framework 2 (FW2) sequence
WIRQTPEKRLEWVA

SEQ ID NO: 996 - DNA, 48 bp, Artificial Sequence
  Mouse antibody 20A10 heavy chain variable complementarity determining regions 2 (CDR2) sequence
tccattggtcgtgctggttccacctactattcagacagtgtgaagggc

SEQ ID NO: 997 - protein, 16 aa, Artificial Sequence
  Mouse antibody 20A10 heavy chain variable complementarity determining regions 2 (CDR2) sequence
SIGRAGSTYYSDSVKG

SEQ ID NO: 998 - DNA, 96 bp, Artificial Sequence
  Mouse antibody 20A10 heavy chain variable framework 3 (FW3) sequence
cgattcaccatctccagagataatgtccggaacatcctgtacctgcaaatgagcagtctgaggtctgaggacacggccatgtattactgtgctaga

SEQ ID NO: 999 - protein, 32 aa, Artificial Sequence
  Mouse antibody 20A10 heavy chain variable framework 3 (FW3) sequence
RFTISRDNVRNILYLQMSSLRSEDTAMYYCAR

SEQ ID NO: 1000 - DNA, 36 bp, Artificial Sequence
  Mouse antibody 20A10 heavy chain variable complementarity determining regions 3 (CDR3) sequence
ggcccgatctacaatgattacgacgagtttgcttac

SEQ ID NO: 1001 - protein, 12 aa, Artificial Sequence
  Mouse antibody 20A10 heavy chain variable complementarity determining regions 3 (CDR3) sequence
GPIYNDYDEFAY

SEQ ID NO: 1002 - DNA, 33 bp, Artificial Sequence; identical to SEQ ID NO: 843
  Mouse antibody 20A10 heavy chain variable framework 4 (FW4) sequence

SEQ ID NO: 1003 - protein, 11 aa, Artificial Sequence
  Mouse antibody 20A10 heavy chain variable framework 4 (FW4) sequence
WGQGTLVTVSA

SEQ ID NO: 1004 - DNA, 396 bp, Artificial Sequence
  Mouse antibody 20A10 Light chain: DNA sequence (396 bp) - Signal sequenceFR1CDR1FR2CDR2FR3CDR3FR4
atggaatcacagactcaggtcttcctctccctgctgctctgggtatctggtacctgtgggaacattatgatgacacagtcgccatcatctctggctgtgtctgcaggagaaaaggtcactatgagctgtaagtccagtcaaagtgttttatacagttcaaatcagaagaactatttggcctggtaccagcagaaaccagggcagtctcctaaactgctgatctactgggcatccactagggaatctggtgtccctgatcgcttcacaggcagtggatctgggacagattttactcttaccatcagcagtgtacaagctgaagacctggcagtttattactgtcatcaatacctctcctcgctcacgttcggtgctgggaccaagctggagctgaaa

SEQ ID NO: 1005 - protein, 132 aa, Artificial Sequence
  Mouse antibody 20A10 Light chain: Amino acid sequence (132 aa) - Signal peptideFR1CDR1FR2CDR2FR3CDR3FR4
MESQTQVFLSLLLWVSGTCGNIMMTQSPSSLAVSAGEKVTMSCKSSQSVLYSSNQKNYLAWYQQKPGQSPKLLIYWASTRESGVPDRFTGSGSGTDFTLTISSVQAEDLAVYYCHQYLSSLTFGAGTKLELK

SEQ ID NO: 1006 - DNA, 69 bp, Artificial Sequence
  Mouse antibody 20A10 light chain variable framework 1 (FW1) sequence
aacattatgatgacacagtcgccatcatctctggctgtgtctgcaggagaaaaggtcactatgagctgt

SEQ ID NO: 1007 - protein, 23 aa, Artificial Sequence
  Mouse antibody 20A10 light chain variable framework 1 (FW1) sequence
NIMMTQSPSSLAVSAGEKVTMSC

SEQ ID NO: 1008 - DNA, 51 bp, Artificial Sequence
  Mouse antibody 20A10 light chain variable complementarity determining regions 1 (CDR1) sequence
aagtccagtcaaagtgttttatacagttcaaatcagaagaactatttggcc

SEQ ID NO: 1009 - protein, 17 aa, Artificial Sequence
  Mouse antibody 20A10 light chain variable complementarity determining regions 1 (CDR1) sequence
KSSQSVLYSSNQKNYLA

SEQ ID NO: 1010 - DNA, 45 bp, Artificial Sequence
  Mouse antibody 20A10 light chain variable framework 2 (FW2) sequence
tggtaccagcagaaaccagggcagtctcctaaactgctgatctac

SEQ ID NO: 1011 - protein, 15 aa, Artificial Sequence
  Mouse antibody 20A10 light chain variable framework 2 (FW2) sequence
WYQQKPGQSPKLLIY

SEQ ID NO: 1012 - DNA, 21 bp, Artificial Sequence
  Mouse antibody 20A10 light chain variable complementarity determining regions 2 (CDR2) sequence
tgggcatccactagggaatct

SEQ ID NO: 1013 - protein, 7 aa, Artificial Sequence
  Mouse antibody 20A10 light chain variable complementarity determining regions 2 (CDR2) sequence
WASTRES

SEQ ID NO: 1014 - DNA, 96 bp, Artificial Sequence
  Mouse antibody 20A10 light chain variable framework 3 (FW3) sequence
ggtgtccctgatcgcttcacaggcagtggatctgggacagattttactcttaccatcagcagtgtacaagctgaagacctggcagtttattactgt

SEQ ID NO: 1015 - protein, 32 aa, Artificial Sequence
  Mouse antibody 20A10 light chain variable framework 3 (FW3) sequence
GVPDRFTGSGSGTDFTLTISSVQAEDLAVYYC

SEQ ID NO: 1016 - DNA, 24 bp, Artificial Sequence
  Mouse antibody 20A10 light chain variable complementarity determining regions 3 (CDR3) sequence
catcaatacctctcctcgctcacg

SEQ ID NO: 1017 - protein, 8 aa, Artificial Sequence
  Mouse antibody 20A10 light chain variable complementarity determining regions 3 (CDR3) sequence
HQYLSSLT

SEQ ID NO: 1018 - DNA, 30 bp, Artificial Sequence
  Mouse antibody 20A10 light chain variable framework 4 (FW4) sequence
ttcggtgctgggaccaagctggagctgaaa

SEQ ID NO: 1019 - protein, 10 aa, Artificial Sequence
  Mouse antibody 20A10 light chain variable framework 4 (FW4) sequence
FGAGTKLELK

SEQ ID NO: 1020 - DNA, 413 bp, Artificial Sequence
  Mouse antibody 25E6 Heavy chain: DNA sequence (414 bp) - Signal sequenceFR1CDR1FR2CDR2FR3CDR3FR4
atgaacttcgggctcagcttgattttccttgccctcattttaaaaggtgtccagtgtgaggtgcagctggtggagtctgggggagacttagtgaagcctggagggtccctgaaactctcctgtgcagcctctggtttcactttcagtagttatggaatgtcttgggttcgccagactccagacaagaggctggagtgggtcgcaaccattagtaatggtggtagacacaccttctatccagacagtgtgaaggggcgattcaccatctccagagacaatgccaagaacaccctgtatctgcaaatgagcagtctgaagttgaggacacagccatgtatttatgtgtaagacagactgggacggagggctggtttgcttactggggccaagggactctggtcactgtctctgca

SEQ ID NO: 1021 - protein, 138 aa, Artificial Sequence
  Mouse antibody 25E6 Heavy chain: Amino acid sequence (138 aa) - Signal peptideFR1CDR1FR2CDR2FR3CDR3FR4
MNFGLSLIFLALILKGVQCEVQLVESGGDLVKPGGSLKLSCAASGFTFSSYGMSWVRQTPDKRLEWVATISNGGRHTFYPDSVKGRFTISRDNAKNTLYLQMSSLKSEDTAMYLCVRQTGTEGWFAYWGQGTLVTVSA

SEQ ID NO: 1022 - DNA, 90 bp, Artificial Sequence
  Mouse antibody 25E6 heavy chain variable framework 1 (FW1) sequence
gaggtgcagctggtggagtctgggggagacttagtgaagcctggagggtccctgaaactctcctgtgcagcctctggtttcactttcagt

SEQ ID NO: 1023 - protein, 30 aa, Artificial Sequence
  Mouse antibody 25E6 heavy chain variable framework 1 (FW1) sequence
EVQLVESGGDLVKPGGSLKLSCAASGFTFS

SEQ ID NO: 1024 - DNA, 15 bp, Artificial Sequence
  Mouse antibody 25E6 heavy chain variable complementarity determining regions 1 (CDR1) sequence
agttatggaatgtct

SEQ ID NO: 1025 - protein, 5 aa, Artificial Sequence
  Mouse antibody 25E6 heavy chain variable complementarity determining regions 1 (CDR1) sequence
SYGMS

SEQ ID NO: 1026 - DNA, 42 bp, Artificial Sequence
  Mouse antibody 25E6 heavy chain variable framework 2 (FW2) sequence
tgggttcgccagactccagacaagaggctggagtgggtcgca

SEQ ID NO: 1027 - protein, 14 aa, Artificial Sequence
  Mouse antibody 25E6 heavy chain variable framework 2 (FW2) sequence
WVRQTPDKRLEWVA

SEQ ID NO: 1028 - DNA, 51 bp, Artificial Sequence
  Mouse antibody 25E6 heavy chain variable complementarity determining regions 2 (CDR2) sequence
accattagtaatggtggtagacacaccttctatccagacagtgtgaagggg

SEQ ID NO: 1029 - protein, 17 aa, Artificial Sequence
  Mouse antibody 25E6 heavy chain variable complementarity determining regions 2 (CDR2) sequence
TISNGGRHTFYPDSVKG

SEQ ID NO: 1030 - DNA, 96 bp, Artificial Sequence
  Mouse antibody 25E6 heavy chain variable framework 3 (FW3) sequence
cgattcaccatctccagagacaatgccaagaacaccctgtatctgcaaatgagcagtctgaagtctgaggacacagccatgtatttatgtgtaaga

SEQ ID NO: 1031 - protein, 32 aa, Artificial Sequence
  Mouse antibody 25E6 heavy chain variable framework 3 (FW3) sequence
RFTISRDNAKNTLYLQMSSLKSEDTAMYLCVR

SEQ ID NO: 1032 - DNA, 30 bp, Artificial Sequence
  Mouse antibody 25E6 heavy chain variable complementarity determining regions 3 (CDR3) sequence
cagactgggacggagggctggtttgcttac

SEQ ID NO: 1033 - protein, 10 aa, Artificial Sequence
  Mouse antibody 25E6 heavy chain variable complementarity determining regions 3 (CDR3) sequence
QTGTEGWFAY

SEQ ID NO: 1034 - DNA, 33 bp, Artificial Sequence; identical to SEQ ID NO: 843
  Mouse antibody 25E6 heavy chain variable framework 4 (FW4) sequence

SEQ ID NO: 1035 - protein, 11 aa, Artificial Sequence
  Mouse antibody 25E6 heavy chain variable framework 4 (FW4) sequence
WGQGTLVTVSA

SEQ ID NO: 1036 - DNA, 392 bp, Artificial Sequence
  Mouse antibody 25E6 Light chain: DNA sequence (393 bp) - Signal sequenceFR1CDR1FR2CDR2FR3CDR3FR4
atgagtcctgcccagttcctgtttctgttagtgctctggattcgggaaaccaacggtgatgttgtgatgacccagactccactcactttgtcggttaccattggacaaccagcctccatctcttgcaagtcaagtcagagcctcttagatagtgatggaaagacatatttgaattggttgttacagaggccaggccagtctccaaagcgcctaatctatctggtgtctaaactggactctggagtccctgacaggttcactggcagtggatcagggacagatttcacactgaaaatcagcagagggaggctgaggatttgggagtttattattgctggcaaggtacacattttcctcagacgttcggtggaggcaccaagctggaaatcaaa

SEQ ID NO: 1037 - protein, 131 aa, Artificial Sequence
  Mouse antibody 25E6 Light chain: Amino acid sequence (131 aa) - Signal peptideFR1CDR1FR2CDR2FR3CDR3FR4
MSPAQFLFLLVLWIRETNGDVVMTQTPLTLSVTIGQPASISCKSSQSLLDSDGKTYLNWLLQRPGQSPKRLIYLVSKLDSGVPDRFTGSGSGTDFTLKISRVEAEDLGVYYCWQGTHFPQTFGGGTKLEIK

SEQ ID NO: 1038 - DNA, 69 bp, Artificial Sequence
  Mouse antibody 25E6 light chain variable framework 1 (FW1) sequence
gatgttgtgatgacccagactccactcactttgtcggttaccattggacaaccagcctccatctcttgc

SEQ ID NO: 1039 - protein, 23 aa, Artificial Sequence
  Mouse antibody 25E6 light chain variable framework 1 (FW1) sequence
DVVMTQTPLTLSVTIGQPASISC

SEQ ID NO: 1040 - DNA, 48 bp, Artificial Sequence
  Mouse antibody 25E6 light chain variable complementarity determining regions 1 (CDR1) sequence
aagtcaagtcagagcctcttagatagtgatggaaagacatatttgaat

SEQ ID NO: 1041 - protein, 16 aa, Artificial Sequence
  Mouse antibody 25E6 light chain variable complementarity determining regions 1 (CDR1) sequence
KSSQSLLDSDGKTYLN

SEQ ID NO: 1042 - DNA, 45 bp, Artificial Sequence; identical to SEQ ID NO: 978
  Mouse antibody 25E6 light chain variable framework 2 (FW2) sequence

SEQ ID NO: 1043 - protein, 15 aa, Artificial Sequence
  Mouse antibody 25E6 light chain variable framework 2 (FW2) sequence
WLLQRPGQSPKRLIY

SEQ ID NO: 1044 - DNA, 21 bp, Artificial Sequence
  Mouse antibody 25E6 light chain variable complementarity determining regions 2 (CDR2) sequence
ctggtgtctaaactggactct

SEQ ID NO: 1045 - protein, 7 aa, Artificial Sequence
  Mouse antibody 25E6 light chain variable complementarity determining regions 2 (CDR2) sequence
LVSKLDS

SEQ ID NO: 1046 - DNA, 96 bp, Artificial Sequence
  Mouse antibody 25E6 light chain variable framework 3 (FW3) sequence
ggagtccctgacaggttcactggcagtggatcagggacagatttcacactgaaaatcagcagagtggaggctgaggatttgggagtttattattgc

SEQ ID NO: 1047 - protein, 32 aa, Artificial Sequence
  Mouse antibody 25E6 light chain variable framework 3 (FW3) sequence
GVPDRFTGSGSGTDFTLKISRVEAEDLGVYYC

SEQ ID NO: 1048 - DNA, 27 bp, Artificial Sequence
  Mouse antibody 25E6 light chain variable complementarity determining regions 3 (CDR3) sequence
tggcaaggtacacattttcctcagacg

SEQ ID NO: 1049 - protein, 9 aa, Artificial Sequence
  Mouse antibody 25E6 light chain variable complementarity determining regions 3 (CDR3) sequence
WQGTHFPQT

SEQ ID NO: 1050 - DNA, 30 bp, Artificial Sequence; identical to SEQ ID NO: 890
  Mouse antibody 25E6 light chain variable framework 4 (FW4) sequence

SEQ ID NO: 1051 - protein, 10 aa, Artificial Sequence
  Mouse antibody 25E6 light chain variable framework 4 (FW4) sequence
FGGGTKLEIK

SEQ ID NO: 1052 - DNA, 399 bp, Artificial Sequence
  Mouse antibody 28F9 Heavy chain: DNA sequence (399 bp) - Signal sequenceFR1CDR1FR2CDR2FR3CDR3FR4
atgggatggagctatatcatcctctttttggtagcaacagctacaggtgtccactcccaggtccaactgcagcagcctggggctgaactggtgcagcctggggcttcagtgaagttgtcctgcaaggcttctggctacaccttcaccggctactttttgtactgggtgaagcagaggcctggacatggccttgagtggattgggggaattcatcctagcaatggtgatactgacttcaatgagaagttcaagaacaaggccacactgactgtagacatatcctccagcactgcctacatgcaactcagcagcctgacatctgaggactctgcggtctattattgtacattactaataggggtctactggggccaaggcaccactctcacagtctcctca

SEQ ID NO: 1053 - protein, 133 aa, Artificial Sequence
  Mouse antibody 28F9 Heavy chain: Amino acid sequence (133 aa) - Signal peptideFR1CDR1FR2CDR2FR3CDR3FR4
MGWSYIILFLVATATGVHSQVQLQQPGAELVQPGASVKLSCKASGYTFTGYFLYWVKQRPGHGLEWIGGIHPSNGDTDFNEKFKNKATLTVDISSSTAYMQLSSLTSEDSAVYYCTLLIGVYWGQGTTLTVSS

SEQ ID NO: 1054 - DNA, 90 bp, Artificial Sequence
  Mouse antibody 28F9 heavy chain variable framework 1 (FW1) sequence
caggtccaactgcagcagcctggggctgaactggtgcagcctggggcttcagtgaagttgtcctgcaaggcttctggctacaccttcacc

SEQ ID NO: 1055 - protein, 30 aa, Artificial Sequence
  Mouse antibody 28F9 heavy chain variable framework 1 (FW1) sequence
QVQLQQPGAELVQPGASVKLSCKASGYTFT

SEQ ID NO: 1056 - DNA, 15 bp, Artificial Sequence
  Mouse antibody 28F9 heavy chain variable complementarity determining regions 1 (CDR1) sequence
ggctactttttgtac

SEQ ID NO: 1057 - protein, 5 aa, Artificial Sequence
  Mouse antibody 28F9 heavy chain variable complementarity determining regions 1 (CDR1) sequence
GYFLY

SEQ ID NO: 1058 - DNA, 42 bp, Artificial Sequence
  Mouse antibody 28F9 heavy chain variable framework 2 (FW2) sequence
tgggtgaagcagaggcctggacatggccttgagtggattggg

SEQ ID NO: 1059 - protein, 14 aa, Artificial Sequence
  Mouse antibody 28F9 heavy chain variable framework 2 (FW2) sequence
WVKQRPGHGLEWIG

SEQ ID NO: 1060 - DNA, 51 bp, Artificial Sequence
  Mouse antibody 28F9 heavy chain variable complementarity determining regions 2 (CDR2) sequence
ggaattcatcctagcaatggtgatactgacttcaatgagaagttcaagaac

SEQ ID NO: 1061 - protein, 17 aa, Artificial Sequence
  Mouse antibody 28F9 heavy chain variable complementarity determining regions 2 (CDR2) sequence
GIHPSNGDTDFNEKFKN

SEQ ID NO: 1062 - DNA, 96 bp, Artificial Sequence
  Mouse antibody 28F9 heavy chain variable framework 3 (FW3) sequence
aaggccacactgactgtagacatatcctccagcactgcctacatgcaactcagcagcctgacatctgaggactctgcggtctattattgtacatta

SEQ ID NO: 1063 - protein, 32 aa, Artificial Sequence
  Mouse antibody 28F9 heavy chain variable framework 3 (FW3) sequence
KATLTVDISSSTAYMQLSSLTSEDSAVYYCTL

SEQ ID NO: 1064 - DNA, 15 bp, Artificial Sequence
  Mouse antibody 28F9 heavy chain variable complementarity determining regions 3 (CDR3) sequence
ctaataggggtctac

SEQ ID NO: 1065 - protein, 5 aa, Artificial Sequence
  Mouse antibody 28F9 heavy chain variable complementarity determining regions 3 (CDR3) sequence
LIGVY

SEQ ID NO: 1066 - DNA, 33 bp, Artificial Sequence; identical to SEQ ID NO: 874
  Mouse antibody 28F9 heavy chain variable framework 4 (FW4) sequence

SEQ ID NO: 1067 - protein, 11 aa, Artificial Sequence
  Mouse antibody 28F9 heavy chain variable framework 4 (FW4) sequence
WGQGTTLTVSS

SEQ ID NO: 1068 - DNA, 393 bp, Artificial Sequence
  Mouse antibody 28F9 Light chain: DNA sequence (393 bp) - Signal sequenceFR1CDR1FR2CDR2FR3CDR3FR4
atgagtcctgcccagttcctgtttctgttagtgctctggattcgggaaaccaacggtgatgttgtgatgacccagactccactcactttgtcggttaccattggacaaccagcctccatctcttgcaagtcaagtcagagcctcttacatagtgatggaaagacatatttgatttggttgttacagaggccaggccagtctccaaagcgcctaatctatctggtgtctaaactggactctggagtccctgacaggttcaccggcagtggatcagggacagatttcacactgaaaatcagcagagtggaggctgaggatttgggagtttatttttgctgtcaaggtacacattttccgtggacgttcggtggaggcaccatgctggaaatcaaa

SEQ ID NO: 1069 - protein, 131 aa, Artificial Sequence; identical to SEQ ID NO: 973
  Mouse antibody 28F9 Light chain: Amino acid sequence (131 aa) - Signal peptideFR1CDR1FR2CDR2FR3CDR3FR4

SEQ ID NO: 1070 - DNA, 69 bp, Artificial Sequence; identical to SEQ ID NO: 1038
  Mouse antibody 28F9 light chain variable framework 1 (FW1) sequence

SEQ ID NO: 1071 - protein, 23 aa, Artificial Sequence
  Mouse antibody 28F9 light chain variable framework 1 (FW1) sequence
DVVMTQTPLTLSVTIGQPASISC

SEQ ID NO: 1072 - DNA, 48 bp, Artificial Sequence; identical to SEQ ID NO: 976
  Mouse antibody 28F9 light chain variable complementarity determining regions 1 (CDR1) sequence

SEQ ID NO: 1073 - protein, 16 aa, Artificial Sequence
  Mouse antibody 28F9 light chain variable complementarity determining regions 1 (CDR1) sequence
KSSQSLLHSDGKTYLI

SEQ ID NO: 1074 - DNA, 45 bp, Artificial Sequence; identical to SEQ ID NO: 978
  Mouse antibody 28F9 light chain variable framework 2 (FW2) sequence

SEQ ID NO: 1075 - protein, 15 aa, Artificial Sequence
  Mouse antibody 28F9 light chain variable framework 2 (FW2) sequence
WLLQRPGQSPKRLIY

SEQ ID NO: 1076 - DNA, 21 bp, Artificial Sequence
  Mouse antibody 28F9 light chain variable complementarity determining regions 2 (CDR2) sequence
ctggtgtctaaactggactct

SEQ ID NO: 1077 - protein, 7 aa, Artificial Sequence
  Mouse antibody 28F9 light chain variable complementarity determining regions 2 (CDR2) sequence
LVSKLDS

SEQ ID NO: 1078 - DNA, 96 bp, Artificial Sequence
  Mouse antibody 28F9 light chain variable framework 3 (FW3) sequence
ggagtccctgacaggttcaccggcagtggatcagggacagatttcacactgaaaatcagcagagtggaggctgaggatttgggagtttatttttgc

SEQ ID NO: 1079 - protein, 32 aa, Artificial Sequence; identical to SEQ ID NO: 983
  Mouse antibody 28F9 light chain variable framework 3 (FW3) sequence

SEQ ID NO: 1080 - DNA, 27 bp, Artificial Sequence
  Mouse antibody 28F9 light chain variable complementarity determining regions 3 (CDR3) sequence
tgtcaaggtacacattttccgtggacg

SEQ ID NO: 1081 - protein, 9 aa, Artificial Sequence
  Mouse antibody 28F9 light chain variable complementarity determining regions 3 (CDR3) sequence
CQGTHFPWT

SEQ ID NO: 1082 - DNA, 30 bp, Artificial Sequence; identical to SEQ ID NO: 986
  Mouse antibody 28F9 light chain variable framework 4 (FW4) sequence

SEQ ID NO: 1083 - protein, 10 aa, Artificial Sequence
  Mouse antibody 28F9 light chain variable framework 4 (FW4) sequence
FGGGTMLEIK

SEQ ID NO: 1084 - DNA, 411 bp, Artificial Sequence
  Mouse antibody 18B4 Heavy chain: DNA sequence (411 bp) - Signal sequenceFR1CDR1FR2CDR2FR3CDR3FR4
atgtacttgggactgaactatgtattcatagtttttctcttaaatggtgtccagagtgaagtgaaacttgaggagtctggaggaggcttggtgcaacctgggggatccatgaaactctcttgtgctgcctctggattcacttttaatgacgcctggatggactgggtccgccagtctccagagaaggggcttgagtgggttgctgaaattagaagcacagctaatattcatacaacatactatgctgagtctgtccaagggaggttcaccatctcaagagatgattccaaaagtagtgtctacctgcaaatgaacagcttgagagctgaagacactggcatttattattgtaccccattactctacggatttgcttactggggccaagggactctggtcactgtctctgca

SEQ ID NO: 1085 - protein, 137 aa, Artificial Sequence
  Mouse antibody 18B4 Heavy chain: Amino acid sequence (137 aa) - Signal peptideFR1CDR1FR2CDR2FR3CDR3FR4
MYLGLNYVFIVFLLNGVQSEVKLEESGGGLVQPGGSMKLSCAASGFTFNDAWMDWVRQSPEKGLEWVAEIRSTANIHTTYYAESVQGRFTISRDDSKSSVYLQMNSLRAEDTGIYYCTPLLYGFAYWGQGTLVTVSA

SEQ ID NO: 1086 - DNA, 90 bp, Artificial Sequence
  Mouse antibody 18B4 heavy chain variable framework 1 (FW1) sequence
gaagtgaaacttgaggagtctggaggaggcttggtgcaacctgggggatccatgaaactctcttgtgctgcctctggattcacttttaat

SEQ ID NO: 1087 - protein, 30 aa, Artificial Sequence
  Mouse antibody 18B4 heavy chain variable framework 1 (FW1) sequence
EVKLEESGGGLVQPGGSMKLSCAASGFTFN

SEQ ID NO: 1088 - DNA, 15 bp, Artificial Sequence
  Mouse antibody 18B4 heavy chain variable complementarity determining regions 1 (CDR1) sequence
gacgcctggatggac

SEQ ID NO: 1089 - protein, 5 aa, Artificial Sequence
  Mouse antibody 18B4 heavy chain variable complementarity determining regions 1 (CDR1) sequence
DAWMD

SEQ ID NO: 1090 - DNA, 42 bp, Artificial Sequence
  Mouse antibody 18B4 heavy chain variable framework 2 (FW2) sequence
tgggtccgccagtctccagagaaggggcttgagtgggttgct

SEQ ID NO: 1091 - protein, 14 aa, Artificial Sequence
  Mouse antibody 18B4 heavy chain variable framework 2 (FW2) sequence
WVRQSPEKGLEWVA

SEQ ID NO: 1092 - DNA, 57 bp, Artificial Sequence
  Mouse antibody 18B4 heavy chain variable complementarity determining regions 2 (CDR2) sequence
gaaattagaagcacagctaatattcatacaacatactatgctgagtctgtccaaggg

SEQ ID NO: 1093 - protein, 19 aa, Artificial Sequence
  Mouse antibody 18B4 heavy chain variable complementarity determining regions 2 (CDR2) sequence
EIRSTANIHTTYYAESVQG

SEQ ID NO: 1094 - DNA, 96 bp, Artificial Sequence
  Mouse antibody 18B4 heavy chain variable framework 3 (FW3) sequence
aggttcaccatctcaagagatgattccaaaagtagtgtctacctgcaaatgaacagcttgagagctgaagacactggcatttattattgtacccca

SEQ ID NO: 1095 - protein, 32 aa, Artificial Sequence
  Mouse antibody 18B4 heavy chain variable framework 3 (FW3) sequence
RFTISRDDSKSSVYLQMNSLRAEDTGIYYCTP

SEQ ID NO: 1096 - DNA, 21 bp, Artificial Sequence
  Mouse antibody 18B4 heavy chain variable complementarity determining regions 3 (CDR3) sequence
ttactctacggatttgcttac

SEQ ID NO: 1097 - protein, 7 aa, Artificial Sequence
  Mouse antibody 18B4 heavy chain variable complementarity determining regions 3 (CDR3) sequence
LLYGFAY

SEQ ID NO: 1098 - DNA, 33 bp, Artificial Sequence; identical to SEQ ID NO: 843
  Mouse antibody 18B4 heavy chain variable framework 4 (FW4) sequence

SEQ ID NO: 1099 - protein, 11 aa, Artificial Sequence
  Mouse antibody 18B4 heavy chain variable framework 4 (FW4) sequence
WGQGTLVTVSA

SEQ ID NO: 1100 - DNA, 393 bp, Artificial Sequence
  Mouse antibody 18B4 Light chain: DNA sequence (393 bp) - Signal sequenceFR1CDR1FR2CDR2FR3CDR3FR4
atgaagttgcctgttaggctgttggtgctgatgttctggattcctgcttccagcagtgatgttgtgatgacccaaagtccactctccctgcctgtcagtcttggagatcaagcctccatctcttgcagaactagtcagagccttgtacacagtaatggaaacacctatttacattggcacctgcagaagccaggccagtctccaaaggtcctgatctacaaagtttccagccgattttctggggtcccagacaggttcagtggcagtggatcggggacagatttcacactcaagatcagcagagtggaggctgaggatctgggagtttatttctgctctcaaaatacacatgttccgtacacgttcggaggggggaccaagctggaaataaaa

SEQ ID NO: 1101 - protein, 131 aa, Artificial Sequence
  Mouse antibody 18B4 Light chain: Amino acid sequence (131 aa) - Signal peptideFR1CDR1FR2CDR2FR3CDR3FR4
MKLPVRLLVLMFWIPASSSDVVMTQSPLSLPVSLGDQASISCRTSQSLVHSNGNTYLHWHLQKPGQSPKVLIYKVSSRFSGVPDRFSGSGSGTDFTLKISRVEAEDLGVYFCSQNTHVPYTFGGGTKLEIK

SEQ ID NO: 1102 - DNA, 69 bp, Artificial Sequence
  Mouse antibody 18B4 light chain variable framework 1 (FW1) sequence
gatgttgtgatgacccaaagtccactctccctgcctgtcagtcttggagatcaagcctccatctcttgc

SEQ ID NO: 1103 - protein, 23 aa, Artificial Sequence
  Mouse antibody 18B4 light chain variable framework 1 (FW1) sequence
DVVMTQSPLSLPVSLGDQASISC

SEQ ID NO: 1104 - DNA, 48 bp, Artificial Sequence
  Mouse antibody 18B4 light chain variable complementarity determining regions 1 (CDR1) sequence
agaactagtcagagccttgtacacagtaatggaaacacctatttacat

SEQ ID NO: 1105 - protein, 16 aa, Artificial Sequence
  Mouse antibody 18B4 light chain variable complementarity determining regions 1 (CDR1) sequence
RTSQSLVHSNGNTYLH

SEQ ID NO: 1106 - DNA, 45 bp, Artificial Sequence
  Mouse antibody 18B4 light chain variable framework 2 (FW2) sequence
tggcacctgcagaagccaggccagtctccaaaggtcctgatctac

SEQ ID NO: 1107 - protein, 15 aa, Artificial Sequence
  Mouse antibody 18B4 light chain variable framework 2 (FW2) sequence
WHLQKPGQSPKVLIY

SEQ ID NO: 1108 - DNA, 21 bp, Artificial Sequence
  Mouse antibody 18B4 light chain variable complementarity determining regions 2 (CDR2) sequence
aaagtttccagccgattttct

SEQ ID NO: 1109 - protein, 7 aa, Artificial Sequence
  Mouse antibody 18B4 light chain variable complementarity determining regions 2 (CDR2) sequence
KVSSRFS

SEQ ID NO: 1110 - DNA, 96 bp, Artificial Sequence
  Mouse antibody 18B4 light chain variable framework 3 (FW3) sequence
ggggtcccagacaggttcagtggcagtggatcggggacagatttcacactcaagatcagcagagtggaggctgaggatctgggagtttatttctgc

SEQ ID NO: 1111 - protein, 32 aa, Artificial Sequence
  Mouse antibody 18B4 light chain variable framework 3 (FW3) sequence
GVPDRFSGSGSGTDFTLKISRVEAEDLGVYFC

SEQ ID NO: 1112 - DNA, 27 bp, Artificial Sequence
  Mouse antibody 18B4 light chain variable complementarity determining regions 3 (CDR3) sequence
tctcaaaatacacatgttccgtacacg

SEQ ID NO: 1113 - protein, 9 aa, Artificial Sequence
  Mouse antibody 18B4 light chain variable complementarity determining regions 3 (CDR3) sequence
SQNTHVPYT

SEQ ID NO: 1114 - DNA, 30 bp, Artificial Sequence
  Mouse antibody 18B4 light chain variable framework 4 (FW4) sequence
ttcggaggggggaccaagctggaaataaaa

SEQ ID NO: 1115 - protein, 10 aa, Artificial Sequence
  Mouse antibody 18B4 light chain variable framework 4 (FW4) sequence
FGGGTKLEIK

SEQ ID NO: 1116 - DNA, 408 bp, Artificial Sequence
  Mouse Antibody IE4 Heavy chain: DNA sequence (408 bp) - Signal sequenceFR1CDR1FR2CDR2FR3CDR3FR4
atggaatggccttgtatctttctcttcctcctgtcagtaactgaaggtgtccactcccaggttcagctgcagcagtctggggctgagctggtgaggcctgggtcctcagtgaagatttcctgtaaggcttctggctatgcattcagtacctactggatgaactgggtgaagcagaggcctggacagggtcttgagtggattggacagatttatcctggagatagtgatactaactacaatggaaagttcaagggtaaagccacactgactgcagacaagtcctccaacacagcctacatgcagctcagcagcctaacatctgaggactctgcggtctttttctgtgcaagaggtaaccacgcctctatggactactggggtcaaggaacctcagtcaccgtctcctca

SEQ ID NO: 1117 - protein, 136 aa, Artificial Sequence
  Mouse Antibody IE4 Heavy chain: Amino acid sequence (136 aa) - Signal peptideFR1CDR1FR2CDR2FR3CDR3FR4
MEWPCIFLFLLSVTEGVHSQVQLQQSGAELVRPGSSVKISCKASGYAFSTYWMNWVKQRPGQGLEWIGQIYPGDSDTNYNGKFKGKATLTADKSSNTAYMQLSSLTSEDSAVFFCARGNHASMDYWGQGTSVTVSS

SEQ ID NO: 1118 - DNA, 90 bp, Artificial Sequence
  Mouse Antibody IE4 heavy chain variable framework 1 (FW1) sequence
caggttcagctgcagcagtctggggctgagctggtgaggcctgggtcctcagtgaagatttcctgtaaggcttctggctatgcattcagt

SEQ ID NO: 1119 - protein, 30 aa, Artificial Sequence
  Mouse Antibody IE4 heavy chain variable framework 1 (FW1) sequence
QVQLQQSGAELVRPGSSVKISCKASGYAFS

SEQ ID NO: 1120-1199 - skipped (80 entries)

SEQ ID NO: 1200 - DNA, 15 bp, Artificial Sequence
  Mouse antibody IE4 heavy chain variable complementarity determining regions 1 (CDR1) sequence
acctactggatgaac

SEQ ID NO: 1201 - protein, 5 aa, Artificial Sequence
  Mouse antibody IE4 heavy chain variable complementarity determining regions 1 (CDR1) sequence
TYWMN

SEQ ID NO: 1202 - DNA, 42 bp, Artificial Sequence
  Mouse antibody IE4 heavy chain variable framework 2 (FW2) sequence
tgggtgaagcagaggcctggacagggtcttgagtggattgga

SEQ ID NO: 1203 - protein, 14 aa, Artificial Sequence
  Mouse antibody IE4 heavy chain variable framework 2 (FW2) sequence
WVKQRPGQGLEWIG

SEQ ID NO: 1204 - DNA, 51 bp, Artificial Sequence
  Mouse antibody IE4 heavy chain variable complementarity determining regions 2 (CDR2) sequence
cagatttatcctggagatagtgatactaactacaatggaaagttcaagggt

SEQ ID NO: 1205 - protein, 17 aa, Artificial Sequence
  Mouse antibody IE4 heavy chain variable complementarity determining regions 2 (CDR2) sequence
QIYPGDSDTNYNGKFKG

SEQ ID NO: 1206 - DNA, 96 bp, Artificial Sequence
  Mouse antibody IE4 heavy chain variable framework 3 (FW3) sequence
aaagccacactgactgcagacaagtcctccaacacagcctacatgcagctcagcagcctaacatctgaggactctgcggtctttttctgtgcaaga

SEQ ID NO: 1207 - protein, 32 aa, Artificial Sequence
  Mouse antibody IE4 heavy chain variable framework 3 (FW3) sequence
KATLTADKSSNTAYMQLSSLTSEDSAVFFCAR

SEQ ID NO: 1208 - DNA, 24 bp, Artificial Sequence
  Mouse antibody IE4 heavy chain variable complementarity determining regions 3 (CDR3) sequence
ggtaaccacgcctctatggactac

SEQ ID NO: 1209 - protein, 8 aa, Artificial Sequence
  Mouse antibody IE4 heavy chain variable complementarity determining regions 3 (CDR3) sequence
GNHASMDY

SEQ ID NO: 1210 - DNA, 33 bp, Artificial Sequence
  Mouse antibody IE4 heavy chain variable framework 4 (FW4) sequence
tggggtcaaggaacctcagtcaccgtctcctca

SEQ ID NO: 1211 - protein, 11 aa, Artificial Sequence
  Mouse antibody IE4 heavy chain variable framework 4 (FW4) sequence
WGQGTSVTVSS

SEQ ID NO: 1212 - DNA, 393 bp, Artificial Sequence
  Mouse Antibody IE4 Light chain: DNA sequence (393 bp) - Signal sequenceFR1CDR1FR2CDR2FR3CDR3FR4
atgaagttgcctgttaggctgttggtgctgatgttctggattcctgcttccagcagtgatgttgtgatgacccaaactccactctccctgcctgtcagtcttggagatcaagcctccatctcttgcagatctagtcagagccttgtacacagtaatggaaacacctatttacattggtacctgcagaagccaggccagtctccaaagctcctgatctacaaagtttccaaccgattttctggggtcccagacaggttcagtggcagtggatcagggacagatttcacactcaagatcagcagagtggaggctgaggatctgggagtttatttctgctctcaaaaaacacatgttccgtggacgttcggtggaggcaccaagctggaaatcaaa

SEQ ID NO: 1213 - protein, 131 aa, Artificial Sequence
  Mouse Antibody IE4 Light chain: Amino acid sequence (131 aa) - Signal peptideFR1CDR1FR2CDR2FR3CDR3FR4
MKLPVRLLVLMFWIPASSSDVVMTQTPLSLPVSLGDQASISCRSSQSLVHSNGNTYLHWYLQKPGQSPKLLIYKVSNRFSGVPDRFSGSGSGTDFTLKISRVEAEDLGVYFCSQKTHVPWTFGGGTKLEIK

SEQ ID NO: 1214 - DNA, 69 bp, Artificial Sequence
  Mouse antibody IE4 light chain variable framework 1 (FW1) sequence
gatgttgtgatgacccaaactccactctccctgcctgtcagtcttggagatcaagcctccatctcttgc

SEQ ID NO: 1215 - protein, 23 aa, Artificial Sequence
  Mouse antibody IE4 light chain variable framework 1 (FW1) sequence
DVVMTQTPLSLPVSLGDQASISC

SEQ ID NO: 1216 - DNA, 48 bp, Artificial Sequence
  Mouse antibody IE4 light chain variable complementarity determining regions 1 (CDR1) sequence
agatctagtcagagccttgtacacagtaatggaaacacctatttacat

SEQ ID NO: 1217 - protein, 16 aa, Artificial Sequence
  Mouse antibody IE4 light chain variable complementarity determining regions 1 (CDR1) sequence
RSSQSLVHSNGNTYLH

SEQ ID NO: 1218 - DNA, 45 bp, Artificial Sequence
  Mouse antibody IE4 light chain variable framework 2 (FW2) sequence
tggtacctgcagaagccaggccagtctccaaagctcctgatctac

SEQ ID NO: 1219 - protein, 15 aa, Artificial Sequence
  Mouse antibody IE4 light chain variable framework 2 (FW2) sequence
WYLQKPGQSPKLLIY

SEQ ID NO: 1220 - DNA, 21 bp, Artificial Sequence
  Mouse antibody IE4 light chain variable complementarity determining regions 2 (CDR2) sequence
aaagtttccaaccgattttct

SEQ ID NO: 1221 - protein, 7 aa, Artificial Sequence
  Mouse antibody IE4 light chain variable complementarity determining regions 2 (CDR2) sequence
KVSNRFS

SEQ ID NO: 1222 - DNA, 96 bp, Artificial Sequence
  Mouse antibody IE4 light chain variable framework 3 (FW3) sequence
ggggtcccagacaggttcagtggcagtggatcagggacagatttcacactcaagatcagcagagtggaggctgaggatctgggagtttatttctgc

SEQ ID NO: 1223 - protein, 32 aa, Artificial Sequence; identical to SEQ ID NO: 1111
  Mouse antibody IE4 light chain variable framework 3 (FW3) sequence

SEQ ID NO: 1224 - DNA, 27 bp, Artificial Sequence
  Mouse antibody IE4 light chain variable complementarity determining regions 3 (CDR3) sequence
tctcaaaaaacacatgttccgtggacg

SEQ ID NO: 1225 - protein, 9 aa, Artificial Sequence
  Mouse antibody IE4 light chain variable complementarity determining regions 3 (CDR3) sequence
SQKTHVPWT

SEQ ID NO: 1226 - DNA, 30 bp, Artificial Sequence; identical to SEQ ID NO: 890
  Mouse antibody IE4 light chain variable framework 4 (FW4) sequence

SEQ ID NO: 1227 - protein, 10 aa, Artificial Sequence
  Mouse antibody IE4 light chain variable framework 4 (FW4) sequence
FGGGTKLEIK

SEQ ID NO: 1228 - DNA, 411 bp, Artificial Sequence
  Mouse antibody 29H1 Heavy chain: DNA sequence (411 bp) - Signal sequenceFR1CDR1FR2CDR2FR3CDR3FR4
atgtacttgggactgaactatgtattcatagtttttctcttaaatggtgtccagagtgaagtgaagcttgaggagtctggaggaggcttggtacaacctggaggatccatgaaactctcttgtgctgcctctggattcacttttagtgacgcctggatggactgggtccgccagtctccagagaaggggcttgaatgggttgctgaaattagaagcaaagctactaatcatgcaacatactatgctgagtctgtgaaagggaggttcaccatctcaagagatgattccaaaagtagtgtctacctgcaaatgaacagcttaagagctgaagacactggcatttattactgtacccccctactttacgggtttgcttactggggccaagggactctggtcactgtctctgca

SEQ ID NO: 1229 - protein, 137 aa, Artificial Sequence
  Mouse antibody 29H1 Heavy chain: Amino acid sequence (137 aa) - Signal peptideFR1CDR1FR2CDR2FR3CDR3FR4
MYLGLNYVFIVFLLNGVQSEVKLEESGGGLVQPGGSMKLSCAASGFTFSDAWMDWVRQSPEKGLEWVAEIRSKATNHATYYAESVKGRFTISRDDSKSSVYLQMNSLRAEDTGIYYCTPLLYGFAYWGQGTLVTVSA

SEQ ID NO: 1230 - DNA, 90 bp, Artificial Sequence
  Mouse antibody 29H1 heavy chain variable framework 1 (FW1) sequence
gaagtgaagcttgaggagtctggaggaggcttggtacaacctggaggatccatgaaactctcttgtgctgcctctggattcacttttagt

SEQ ID NO: 1231 - protein, 30 aa, Artificial Sequence
  Mouse antibody 29H1 heavy chain variable framework 1 (FW1) sequence
EVKLEESGGGLVQPGGSMKLSCAASGFTFS

SEQ ID NO: 1232 - DNA, 15 bp, Artificial Sequence
  Mouse antibody 29H1 heavy chain variable complementarity determining regions 1 (CDR1) sequence
gacgcctggatggac

SEQ ID NO: 1233 - protein, 5 aa, Artificial Sequence
  Mouse antibody 29H1 heavy chain variable complementarity determining regions 1 (CDR1) sequence
DAWMD

SEQ ID NO: 1234 - DNA, 42 bp, Artificial Sequence
  Mouse antibody 29H1 heavy chain variable framework 2 (FW2) sequence
tgggtccgccagtctccagagaaggggcttgaatgggttgct

SEQ ID NO: 1235 - protein, 14 aa, Artificial Sequence
  Mouse antibody 29H1 heavy chain variable framework 2 (FW2) sequence
WVRQSPEKGLEWVA

SEQ ID NO: 1236 - DNA, 57 bp, Artificial Sequence
  Mouse antibody 29H1 heavy chain variable complementarity determining regions 2 (CDR2) sequence
gaaattagaagcaaagctactaatcatgcaacatactatgctgagtctgtgaaaggg

SEQ ID NO: 1237 - protein, 19 aa, Artificial Sequence
  Mouse antibody 29H1 heavy chain variable complementarity determining regions 2 (CDR2) sequence
EIRSKATNHATYYAESVKG

SEQ ID NO: 1238 - DNA, 96 bp, Artificial Sequence
  Mouse antibody 29H1 heavy chain variable framework 3 (FW3) sequence
aggttcaccatctcaagagatgattccaaaagtagtgtctacctgcaaatgaacagcttaagagctgaagacactggcatttattactgtaccccc

SEQ ID NO: 1239 - protein, 32 aa, Artificial Sequence; identical to SEQ ID NO: 1095
  Mouse antibody 29H1 heavy chain variable framework 3 (FW3) sequence

SEQ ID NO: 1240 - DNA, 21 bp, Artificial Sequence
  Mouse antibody 29H1 heavy chain variable complementarity determining regions 3 (CDR3) sequence
ctactttacgggtttgcttac

SEQ ID NO: 1241 - protein, 7 aa, Artificial Sequence
  Mouse antibody 29H1 heavy chain variable complementarity determining regions 3 (CDR3) sequence
LLYGFAY

SEQ ID NO: 1242 - DNA, 33 bp, Artificial Sequence; identical to SEQ ID NO: 843
  Mouse antibody 29H1 heavy chain variable framework 4 (FW4) sequence

SEQ ID NO: 1243 - protein, 11 aa, Artificial Sequence
  Mouse antibody 29H1 heavy chain variable framework 4 (FW4) sequence
WGQGTLVTVSA

SEQ ID NO: 1244 - DNA, 393 bp, Artificial Sequence
  Mouse antibody 29H1 Light chain: DNA sequence (393 bp) - Signal sequenceFR1CDR1FR2CDR2FR3CDR3FR4
atgaagttgcctgttaggctgttggtgctgatgttctggattcctgcttccagcagtgatgttgtgatgacccaaactccactctccctgcctgtcagtcttggagatcaagcctccatctcttgcagatctggtcagagccttgtacacagtaatggacacacctatttacattggtacctgcagaagccaggccagtctccaaggctcctgatctacaaagtttccaaccgattttctggggtcccagacaggttcagtggcagtggatcaagggcagatttcacactcaagatcagcagagtggaggctgaggatctgggagtttatttctgctctcaaactacacatgttccgtggacgttcggtggaggcaccaagctggaaatcaaa

SEQ ID NO: 1245 - protein, 131 aa, Artificial Sequence
  Mouse antibody 29H1 Light chain: Amino acid sequence (131 aa) - Signal peptideFR1CDR1FR2CDR2FR3CDR3FR4
MKLPVRLLVLMFWIPASSSDVVMTQTPLSLPVSLGDQASISCRSGQSLVHSNGHTYLHWYLQKPGQSPRLLIYKVSNRFSGVPDRFSGSGSRADFTLKISRVEAEDLGVYFCSQTTHVPWTFGGGTKLEIK

SEQ ID NO: 1246 - DNA, 69 bp, Artificial Sequence; identical to SEQ ID NO: 1214
  Mouse antibody 29H1 light chain variable framework 1 (FW1) sequence

SEQ ID NO: 1247 - protein, 23 aa, Artificial Sequence
  Mouse antibody 29H1 light chain variable framework 1 (FW1) sequence
DVVMTQTPLSLPVSLGDQASISC

SEQ ID NO: 1248 - DNA, 48 bp, Artificial Sequence
  Mouse antibody 29H1 light chain variable complementarity determining regions 1 (CDR1) sequence
agatctggtcagagccttgtacacagtaatggacacacctatttacat

SEQ ID NO: 1249 - protein, 16 aa, Artificial Sequence
  Mouse antibody 29H1 light chain variable complementarity determining regions 1 (CDR1) sequence
RSGQSLVHSNGHTYLH

SEQ ID NO: 1250 - DNA, 45 bp, Artificial Sequence
  Mouse antibody 29H1 light chain variable framework 2 (FW2) sequence
tggtacctgcagaagccaggccagtctccaaggctcctgatctac

SEQ ID NO: 1251 - protein, 15 aa, Artificial Sequence
  Mouse antibody 29H1 light chain variable framework 2 (FW2) sequence
WYLQKPGQSPRLLIY

SEQ ID NO: 1252 - DNA, 21 bp, Artificial Sequence
  Mouse antibody 29H1 light chain variable complementarity determining regions 2 (CDR2) sequence
aaagtttccaaccgattttct

SEQ ID NO: 1253 - protein, 7 aa, Artificial Sequence
  Mouse antibody 29H1 light chain variable complementarity determining regions 2 (CDR2) sequence
KVSNRFS

SEQ ID NO: 1254 - DNA, 96 bp, Artificial Sequence
  Mouse antibody 29H1 light chain variable framework 3 (FW3) sequence
ggggtcccagacaggttcagtggcagtggatcaagggcagatttcacactcaagatcagcagagtggaggctgaggatctgggagtttatttctgc

SEQ ID NO: 1255 - protein, 32 aa, Artificial Sequence
  Mouse antibody 29H1 light chain variable framework 3 (FW3) sequence
GVPDRFSGSGSRADFTLKISRVEAEDLGVYFC

SEQ ID NO: 1256 - DNA, 27 bp, Artificial Sequence
  Mouse antibody 29H1 light chain variable complementarity determining regions 3 (CDR3) sequence
tctcaaactacacatgttccgtggacg

SEQ ID NO: 1257 - protein, 9 aa, Artificial Sequence
  Mouse antibody 29H1 light chain variable complementarity determining regions 3 (CDR3) sequence
SQTTHVPWT

SEQ ID NO: 1258 - DNA, 30 bp, Artificial Sequence; identical to SEQ ID NO: 890
  Mouse antibody 29H1 light chain variable framework 4 (FW4) sequence

SEQ ID NO: 1259 - protein, 10 aa, Artificial Sequence
  Mouse antibody 29H1 light chain variable framework 4 (FW4) sequence
FGGGTKLEIK

SEQ ID NO: 1260 - DNA, 399 bp, Artificial Sequence
  Mouse antibody 31A1 Heavy chain: DNA sequence (399 bp) - Signal sequenceFR1CDR1FR2CDR2FR3CDR3FR4
atggaaaggcactggatctttctcttcctgttttcagtaactgcaggtgtccactcccaggtccagcttcagcagtctggggctgaactggcaaaacctggggcctcagtgaagatgtcctgcaaggcttctggctacacctttactagctactggatgcactgggtaaaacagaggcctggacagggtctggaatggattggatacattaatcctagcactggttatactgagtacaatcagaagttcaaggacaaggccacattgactgcagacaaatcctccagcacagcctacatgcaactgagcagcctgacatctgaggactctgcagtctattactgtgcaagagcctacattgactactggggccaaggcaccactctcacagtctcctca

SEQ ID NO: 1261 - protein, 133 aa, Artificial Sequence
  Mouse antibody 31A1 Heavy chain: Amino acid sequence (133 aa) - Signal peptideFR1CDR1FR2CDR2FR3CDR3FR4
MERHWIFLFLFSVTAGVHSQVQLQQSGAELAKPGASVKMSCKASGYTFTSYWMHWVKQRPGQGLEWIGYINPSTGYTEYNQKFKDKATLTADKSSSTAYMQLSSLTSEDSAVYYCARAYIDYWGQGTTLTVSS

SEQ ID NO: 1262 - DNA, 90 bp, Artificial Sequence
  Mouse antibody 31A1 heavy chain variable framework 1 (FW1) sequence
caggtccagcttcagcagtctggggctgaactggcaaaacctggggcctcagtgaagatgtcctgcaaggcttctggctacacctttact

SEQ ID NO: 1263 - protein, 30 aa, Artificial Sequence
  Mouse antibody 31A1 heavy chain variable framework 1 (FW1) sequence
QVQLQQSGAELAKPGASVKMSCKASGYTFT

SEQ ID NO: 1264 - DNA, 15 bp, Artificial Sequence
  Mouse antibody 31A1 heavy chain variable complementarity determining regions 1 (CDR1) sequence
agctactggatgcac

SEQ ID NO: 1265 - protein, 5 aa, Artificial Sequence
  Mouse antibody 31A1 heavy chain variable complementarity determining regions 1 (CDR1) sequence
SYWMH

SEQ ID NO: 1266 - DNA, 42 bp, Artificial Sequence
  Mouse antibody 31A1 heavy chain variable framework 2 (FW2) sequence
tgggtaaaacagaggcctggacagggtctggaatggattgga

SEQ ID NO: 1267 - protein, 14 aa, Artificial Sequence
  Mouse antibody 31A1 heavy chain variable framework 2 (FW2) sequence
WVKQRPGQGLEWIG

SEQ ID NO: 1268 - DNA, 51 bp, Artificial Sequence
  Mouse antibody 31A1 heavy chain variable complementarity determining regions 2 (CDR2) sequence
tacattaatcctagcactggttatactgagtacaatcagaagttcaaggac

SEQ ID NO: 1269 - protein, 17 aa, Artificial Sequence
  Mouse antibody 31A1 heavy chain variable complementarity determining regions 2 (CDR2) sequence
YINPSTGYTEYNQKFKD

SEQ ID NO: 1270 - DNA, 96 bp, Artificial Sequence
  Mouse antibody 31A1 heavy chain variable framework 3 (FW3) sequence
aaggccacattgactgcagacaaatcctccagcacagcctacatgcaactgagcagcctgacatctgaggactctgcagtctattactgtgcaaga

SEQ ID NO: 1271 - protein, 32 aa, Artificial Sequence
  Mouse antibody 31A1 heavy chain variable framework 3 (FW3) sequence
KATLTADKSSSTAYMQLSSLTSEDSAVYYCAR

SEQ ID NO: 1272 - DNA, 15 bp, Artificial Sequence
  Mouse antibody 31A1 heavy chain variable complementarity determining regions 3 (CDR3) sequence
gcctacattgactac

SEQ ID NO: 1273 - protein, 5 aa, Artificial Sequence
  Mouse antibody 31A1 heavy chain variable complementarity determining regions 3 (CDR3) sequence
AYIDY

SEQ ID NO: 1274 - DNA, 33 bp, Artificial Sequence; identical to SEQ ID NO: 874
  Mouse antibody 31A1 heavy chain variable framework 4 (FW4) sequence

SEQ ID NO: 1275 - protein, 11 aa, Artificial Sequence
  Mouse antibody 31A1 heavy chain variable framework 4 (FW4) sequence
WGQGTTLTVSS

SEQ ID NO: 1276 - DNA, 393 bp, Artificial Sequence
  Mouse antibody 31A1 Light chain: DNA sequence (393 bp) - Signal sequenceFR1CDR1FR2CDR2FR3CDR3FR4
atgaagttgcctgttaggctgttggtgctgatgttctggattcctgcttccagcagtgatgttttgatgacccaaactccactctccctgcctgtcagtcttggagatcaagcctccttctcttgcagatctagtcagagcattgtacatagtaatggaaacacctatttagaatggtacctgcagaaaccaggccagtctccaaagctcctgatctacaaagtttccaaccgattttctggggtcccagacaggttcagtggcagtggatcagggacagatttcacactcaagatcaacagagtggaggctgaggatctgggagtttattactgctttcaagtttcacattttccgtggacgttcggtggaggcaccaagctggaaatcaaa

SEQ ID NO: 1277 - protein, 131 aa, Artificial Sequence
  Mouse antibody 31A1 Light chain: Amino acid sequence (131 aa) - Signal peptideFR1CDR1FR2CDR2FR3CDR3FR4
MKLPVRLLVLMFWIPASSSDVLMTQTPLSLPVSLGDQASFSCRSSQSIVHSNGNTYLEWYLQKPGQSPKLLIYKVSNRFSGVPDRFSGSGSGTDFTLKINRVEAEDLGVYYCFQVSHFPWTFGGGTKLEIK

SEQ ID NO: 1278 - DNA, 69 bp, Artificial Sequence
  Mouse antibody 31A1 light chain variable framework 1 (FW1) sequence
gatgttttgatgacccaaactccactctccctgcctgtcagtcttggagatcaagcctccttctcttgc

SEQ ID NO: 1279 - protein, 23 aa, Artificial Sequence
  Mouse antibody 31A1 light chain variable framework 1 (FW1) sequence
DVLMTQTPLSLPVSLGDQASFSC

SEQ ID NO: 1280 - DNA, 48 bp, Artificial Sequence; identical to SEQ ID NO: 880
  Mouse antibody 31A1 light chain variable complementarity determining regions 1 (CDR1) sequence

SEQ ID NO: 1281 - protein, 16 aa, Artificial Sequence
  Mouse antibody 31A1 light chain variable complementarity determining regions 1 (CDR1) sequence
RSSQSIVHRNGNTYLE

SEQ ID NO: 1282 - DNA, 45 bp, Artificial Sequence; identical to SEQ ID NO: 464
  Mouse antibody 31A1 light chain variable framework 2 (FW2) sequence

SEQ ID NO: 1283 - protein, 15 aa, Artificial Sequence
  Mouse antibody 31A1 light chain variable framework 2 (FW2) sequence
WYLQKPGQSPKLLIY

SEQ ID NO: 1284 - DNA, 21 bp, Artificial Sequence
  Mouse antibody 31A1 light chain variable complementarity determining regions 2 (CDR2) sequence
aaagtttccaaccgattttct

SEQ ID NO: 1285 - protein, 7 aa, Artificial Sequence
  Mouse antibody 31A1 light chain variable complementarity determining regions 2 (CDR2) sequence
KVSNRFS

SEQ ID NO: 1286 - DNA, 96 bp, Artificial Sequence; identical to SEQ ID NO: 468
  Mouse antibody 31A1 light chain variable framework 3 (FW3) sequence

SEQ ID NO: 1287 - protein, 32 aa, Artificial Sequence; identical to SEQ ID NO: 469
  Mouse antibody 31A1 light chain variable framework 3 (FW3) sequence

SEQ ID NO: 1288 - DNA, 27 bp, Artificial Sequence
  Mouse antibody 31A1 light chain variable complementarity determining regions 3 (CDR3) sequence
tttcaagtttcacattttccgtggacg

SEQ ID NO: 1289 - protein, 9 aa, Artificial Sequence
  Mouse antibody 31A1 light chain variable complementarity determining regions 3 (CDR3) sequence
FQVSHFPWT

SEQ ID NO: 1290 - DNA, 30 bp, Artificial Sequence; identical to SEQ ID NO: 890
  Mouse antibody 31A1 light chain variable framework 4 (FW4) sequence

SEQ ID NO: 1291 - protein, 10 aa, Artificial Sequence
  Mouse antibody 31A1 light chain variable framework 4 (FW4) sequence
FGGGTKLEIK

SEQ ID NO: 1292 - DNA, 411 bp, Artificial Sequence
  Mouse antibody 32C1 Heavy chain: DNA sequence (411 bp) - Signal sequenceFR1CDR1FR2CDR2FR3CDR3FR4
atgtacttgggactgaactgtgtattcatagtttttctcttaaaaggtgtccagagtgaagtgaagcttgaggagtctggaggaggcttggtgcaatctggaggatccatgaaactctcctgtgttgcctctggattcactttcagtaattactggatgaactgggtccgccagtctccagagaaggggcttgagtgggttgctgaaattagattgaaatctaataattatgcaatacattatgcggagtctgtgaaggggaggttcaccatctcaagagatgattccaaaagtagtgtctacctgcaaatgaacaacttaagagctgaagacactggcatttattactgtaccagggtcccgggactggatgcttactggggccaagggactctggtcactgtctctgca

SEQ ID NO: 1293 - protein, 137 aa, Artificial Sequence
  Mouse antibody 32C1 Heavy chain: Amino acid sequence (137 aa) - Signal peptideFR1CDR1FR2CDR2FR3CDR3FR4
MYLGLNCVFIVFLLKGVQSEVKLEESGGGLVQSGGSMKLSCVASGFTFSNYWMNWVRQSPEKGLEWVAEIRLKSNNYAIHYAESVKGRFTISRDDSKSSVYLQMNNLRAEDTGIYYCTRVPGLDAYWGQGTLVTVSA

SEQ ID NO: 1294 - DNA, 90 bp, Artificial Sequence
  Mouse antibody 32C1 heavy chain variable framework 1 (FW1) sequence
gaagtgaagcttgaggagtctggaggaggcttggtgcaatctggaggatccatgaaactctcctgtgttgcctctggattcactttcagt

SEQ ID NO: 1295 - protein, 30 aa, Artificial Sequence
  Mouse antibody 32C1 heavy chain variable framework 1 (FW1) sequence
EVKLEESGGGLVQSGGSMKLSCVASGFTFS

SEQ ID NO: 1296 - DNA, 15 bp, Artificial Sequence
  Mouse antibody 32C1 heavy chain variable complementarity determining regions 1 (CDR1) sequence
aattactggatgaac

SEQ ID NO: 1297 - protein, 5 aa, Artificial Sequence
  Mouse antibody 32C1 heavy chain variable complementarity determining regions 1 (CDR1) sequence
NYWMN

SEQ ID NO: 1298 - DNA, 42 bp, Artificial Sequence; identical to SEQ ID NO: 1090
  Mouse antibody 32C1 heavy chain variable framework 2 (FW2) sequence

SEQ ID NO: 1299 - protein, 14 aa, Artificial Sequence
  Mouse antibody 32C1 heavy chain variable framework 2 (FW2) sequence
WVRQSPEKGLEWVA

SEQ ID NO: 1300 - DNA, 57 bp, Artificial Sequence
  Mouse antibody 32C1 heavy chain variable complementarity determining regions 2 (CDR2) sequence
gaaattagattgaaatctaataattatgcaatacattatgcggagtctgtgaagggg

SEQ ID NO: 1301 - protein, 19 aa, Artificial Sequence
  Mouse antibody 32C1 heavy chain variable complementarity determining regions 2 (CDR2) sequence
EIRLKSNNYAIHYAESVKG

SEQ ID NO: 1302 - DNA, 96 bp, Artificial Sequence
  Mouse antibody 32C1 heavy chain variable framework 3 (FW3) sequence
aggttcaccatctcaagagatgattccaaaagtagtgtctacctgcaaatgaacaacttaagagctgaagacactggcatttattactgtaccagg

SEQ ID NO: 1303 - protein, 32 aa, Artificial Sequence
  Mouse antibody 32C1 heavy chain variable framework 3 (FW3) sequence
RFTISRDDSKSSVYLQMNNLRAEDTGIYYCTR

SEQ ID NO: 1304 - DNA, 21 bp, Artificial Sequence
  Mouse antibody 32C1 heavy chain variable complementarity determining regions 3 (CDR3) sequence
gtcccgggactggatgcttac

SEQ ID NO: 1305 - protein, 7 aa, Artificial Sequence
  Mouse antibody 32C1 heavy chain variable complementarity determining regions 3 (CDR3) sequence
VPGLDAY

SEQ ID NO: 1306 - DNA, 33 bp, Artificial Sequence; identical to SEQ ID NO: 843
  Mouse antibody 32C1 heavy chain variable framework 4 (FW4) sequence

SEQ ID NO: 1307 - protein, 11 aa, Artificial Sequence
  Mouse antibody 32C1 heavy chain variable framework 4 (FW4) sequence
WGQGTLVTVSA

SEQ ID NO: 1308 - DNA, 393 bp, Artificial Sequence
  Mouse antibody 32C1 Light chain: DNA sequence (393 bp) - Signal sequenceFR1CDR1FR2CDR2FR3CDR3FR4
atgaagttgcctgttaggctgttggtgctgatgttctggattcctgcttccagcagtgatgttgtgatgacccaaactccactctccctgcctgtcagtcttggagatcaagcctccatctcttgcagatctagtcagagccttgtacacagtaatggaaacacctatttacattggtacctgcagaagccaggccagtctccaaagctcctgatctacaaagtttccaaccgattttctggggtcccagacaggttcagtggcagtggatcagggacagatttcacactcaagatcagcagtgtggaggctgaggatctgggagtttatttctgctctcaaattacacatgttccgtacacgttcggaggggggaccaatctggaaataaaa

SEQ ID NO: 1309 - protein, 131 aa, Artificial Sequence
  Mouse antibody 32C1 Light chain: Amino acid sequence (131 aa) - Signal peptideFR1CDR1FR2CDR2FR3CDR3FR4
MKLPVRLLVLMFWIPASSSDVVMTQTPLSLPVSLGDQASISCRSSQSLVHSNGNTYLHWYLQKPGQSPKLLIYKVSNRFSGVPDRFSGSGSGTDFTLKISSVEAEDLGVYFCSQITHVPYTFGGGTNLEIK

SEQ ID NO: 1310 - DNA, 69 bp, Artificial Sequence; identical to SEQ ID NO: 1214
  Mouse antibody 32C1 light chain variable framework 1 (FW1) sequence

SEQ ID NO: 1311 - protein, 23 aa, Artificial Sequence
  Mouse antibody 32C1 light chain variable framework 1 (FW1) sequence
DVVMTQTPLSLPVSLGDQASISC

SEQ ID NO: 1312 - DNA, 48 bp, Artificial Sequence; identical to SEQ ID NO: 1216
  Mouse antibody 32C1 light chain variable complementarity determining regions 1 (CDR1) sequence

SEQ ID NO: 1313 - protein, 16 aa, Artificial Sequence
  Mouse antibody 32C1 light chain variable complementarity determining regions 1 (CDR1) sequence
RSSQSLVHSNGNTYLH

SEQ ID NO: 1314 - DNA, 45 bp, Artificial Sequence; identical to SEQ ID NO: 1218
  Mouse antibody 32C1 light chain variable framework 2 (FW2) sequence

SEQ ID NO: 1315 - protein, 15 aa, Artificial Sequence
  Mouse antibody 32C1 light chain variable framework 2 (FW2) sequence
WYLQKPGQSPKLLIY

SEQ ID NO: 1316 - DNA, 21 bp, Artificial Sequence
  Mouse antibody 32C1 light chain variable complementarity determining regions 2 (CDR2) sequence
aaagtttccaaccgattttct

SEQ ID NO: 1317 - protein, 7 aa, Artificial Sequence
  Mouse antibody 32C1 light chain variable complementarity determining regions 2 (CDR2) sequence
KVSNRFS

SEQ ID NO: 1318 - DNA, 96 bp, Artificial Sequence
  Mouse antibody 32C1 light chain variable framework 3 (FW3) sequence
ggggtcccagacaggttcagtggcagtggatcagggacagatttcacactcaagatcagcagtgtggaggctgaggatctgggagtttatttctgc

SEQ ID NO: 1319 - protein, 32 aa, Artificial Sequence
  Mouse antibody 32C1 light chain variable framework 3 (FW3) sequence
GVPDRFSGSGSGTDFTLKISSVEAEDLGVYFC

SEQ ID NO: 1320 - DNA, 27 bp, Artificial Sequence
  Mouse antibody 32C1 light chain variable complementarity determining regions 3 (CDR3) sequence
tctcaaattacacatgttccgtacacg

SEQ ID NO: 1321 - protein, 9 aa, Artificial Sequence
  Mouse antibody 32C1 light chain variable complementarity determining regions 3 (CDR3) sequence
SQITHVPYT

SEQ ID NO: 1322 - DNA, 30 bp, Artificial Sequence
  Mouse antibody 32C1 light chain variable framework 4 (FW4) sequence
ttcggaggggggaccaatctggaaataaaa

SEQ ID NO: 1323 - protein, 10 aa, Artificial Sequence
  Mouse antibody 32C1 light chain variable framework 4 (FW4) sequence
FGGGTNLEIK

SEQ ID NO: 1324 - DNA, 423 bp, Artificial Sequence
  Mouse antibody 45C11 Heavy chain: DNA sequence (423 bp) - Signal sequenceFR1CDR1FR2CDR2FR3CDR3FR4
atgaaatgcagctgggttatcttcttcctgatggcagtggttacaggggtcaattcagaggttcagctgcagcagtctggggcagaccttgtgaagccaggggcctcagtcaagttgtcctgcacagcttctggcttcaacattaaagacacctttatgcactgggtgaagcagaggcctgaacagggcctggagtggattggaaggattgatcctgcgaatggtaatactaaatatgacccgaaattccagggcaaggccactataacagcagacacatcctccaacacagcctacctgcagctcagcagcctgacatctgaggacactgccgtctattactgtgctaaaccgtatggtaactacggctattactatgctttggactactggggtcaaggaacctcagtcaccgtctcctca

SEQ ID NO: 1325 - protein, 141 aa, Artificial Sequence
  Mouse antibody 45C11 Heavy chain: Amino acid sequence (141 aa) - Signal peptideFR1CDR1FR2CDR2FR3CDR3FR4
MKCSWVIFFLMAVVTGVNSEVQLQQSGADLVKPGASVKLSCTASGFNIKDTFMHWVKQRPEQGLEWIGRIDPANGNTKYDPKFQGKATITADTSSNTAYLQLSSLTSEDTAVYYCAKPYGNYGYYYALDYWGQGTSVTVSS

SEQ ID NO: 1326 - DNA, 90 bp, Artificial Sequence
  Mouse antibody 45C11 heavy chain variable framework 1 (FW1) sequence
gaggttcagctgcagcagtctggggcagaccttgtgaagccaggggcctcagtcaagttgtcctgcacagcttctggcttcaacattaaa

SEQ ID NO: 1327 - protein, 30 aa, Artificial Sequence
  Mouse antibody 45C11 heavy chain variable framework 1 (FW1) sequence
EVQLQQSGADLVKPGASVKLSCTASGFNIK

SEQ ID NO: 1328 - DNA, 15 bp, Artificial Sequence
  Mouse antibody 45C11 heavy chain variable complementarity determining regions 1 (CDR1) sequence
gacacctttatgcac

SEQ ID NO: 1329 - protein, 5 aa, Artificial Sequence
  Mouse antibody 45C11 heavy chain variable complementarity determining regions 1 (CDR1) sequence
DTFMH

SEQ ID NO: 1330 - DNA, 42 bp, Artificial Sequence
  Mouse antibody 45C11 heavy chain variable framework 2 (FW2) sequence
tgggtgaagcagaggcctgaacagggcctggagtggattgga

SEQ ID NO: 1331 - protein, 14 aa, Artificial Sequence
  Mouse antibody 45C11 heavy chain variable framework 2 (FW2) sequence
WVKQRPEQGLEWIG

SEQ ID NO: 1332 - DNA, 51 bp, Artificial Sequence
  Mouse antibody 45C11 heavy chain variable complementarity determining regions 2 (CDR2) sequence
aggattgatcctgcgaatggtaatactaaatatgacccgaaattccagggc

SEQ ID NO: 1333 - protein, 17 aa, Artificial Sequence
  Mouse antibody 45C11 heavy chain variable complementarity determining regions 2 (CDR2) sequence
RIDPANGNTKYDPKFQG

SEQ ID NO: 1334 - DNA, 96 bp, Artificial Sequence
  Mouse antibody 45C11 heavy chain variable framework 3 (FW3) sequence
aaggccactataacagcagacacatcctccaacacagcctacctgcagctcagcagcctgacatctgaggacactgccgtctattactgtgctaaa

SEQ ID NO: 1335 - protein, 32 aa, Artificial Sequence
  Mouse antibody 45C11 heavy chain variable framework 3 (FW3) sequence
KATITADTSSNTAYLQLSSLTSEDTAVYYCAK

SEQ ID NO: 1336 - DNA, 39 bp, Artificial Sequence
  Mouse antibody 45C11 heavy chain variable complementarity determining regions 3 (CDR3) sequence
ccgtatggtaactacggctattactatgctttggactac

SEQ ID NO: 1337 - protein, 13 aa, Artificial Sequence
  Mouse antibody 45C11 heavy chain variable complementarity determining regions 3 (CDR3) sequence
PYGNYGYYYALDY

SEQ ID NO: 1338 - DNA, 33 bp, Artificial Sequence; identical to SEQ ID NO: 1210
  Mouse antibody 45C11 heavy chain variable framework 4 (FW4) sequence

SEQ ID NO: 1339 - protein, 11 aa, Artificial Sequence
  Mouse antibody 45C11 heavy chain variable framework 4 (FW4) sequence
WGQGTSVTVSS

SEQ ID NO: 1340 - DNA, 381 bp, Artificial Sequence
  Mouse antibody 45C11 Light chain: DNA sequence (381 bp) - Signal sequenceFR1CDR1FR2CDR2FR3CDR3FR4
atgaggttccaggttcaggttctggggctccttctgctctggatatcaggtgcccagtgtgatgtccagataacccagtctccatcttatcttgctgcatctcctggagaaaccattactattaattgcagggcaagtaagagcattagcaaatatttagcctggtatcaagagaaacctgggaaaactaataagcttcttatctactctggatccactttgcaatctggaattccatcaaggttcagtggcagtggatctggtacagatttcactctcaccatcagtagcctggagcctgaagattttgcaatgtattactgtcaacagcataatgaattcccgtggacgttcggtggaggcaccaagctggaaatcaaa

SEQ ID NO: 1341 - protein, 127 aa, Artificial Sequence
  Mouse antibody 45C11 Light chain: Amino acid sequence (127 aa) - Signal peptideFR1CDR1FR2CDR2FR3CDR3FR4
MRFQVQVLGLLLLWISGAQCDVQITQSPSYLAASPGETITINCRASKSISKYLAWYQEKPGKTNKLLIYSGSTLQSGIPSRFSGSGSGTDFTLTISSLEPEDFAMYYCQQHNEFPWTFGGGTKLEIK

SEQ ID NO: 1342 - DNA, 69 bp, Artificial Sequence
  Mouse antibody 45C11 light chain variable framework 1 (FW1) sequence
gatgtccagataacccagtctccatcttatcttgctgcatctcctggagaaaccattactattaattgc

SEQ ID NO: 1343 - protein, 23 aa, Artificial Sequence
  Mouse antibody 45C11 light chain variable framework 1 (FW1) sequence
DVQITQSPSYLAASPGETITINC

SEQ ID NO: 1344 - DNA, 33 bp, Artificial Sequence
  Mouse antibody 45C11 light chain variable complementarity determining regions 1 (CDR1) sequence
agggcaagtaagagcattagcaaatatttagcc

SEQ ID NO: 1345 - protein, 11 aa, Artificial Sequence
  Mouse antibody 45C11 light chain variable complementarity determining regions 1 (CDR1) sequence
RASKSISKYLA

SEQ ID NO: 1346 - DNA, 45 bp, Artificial Sequence
  Mouse antibody 45C11 light chain variable framework 2 (FW2) sequence
tggtatcaagagaaacctgggaaaactaataagcttcttatctac

SEQ ID NO: 1347 - protein, 15 aa, Artificial Sequence
  Mouse antibody 45C11 light chain variable framework 2 (FW2) sequence
WYQEKPGKTNKLLIY

SEQ ID NO: 1348 - DNA, 21 bp, Artificial Sequence
  Mouse antibody 45C11 light chain variable complementarity determining regions 2 (CDR2) sequence
tctggatccactttgcaatct

SEQ ID NO: 1349 - protein, 7 aa, Artificial Sequence
  Mouse antibody 45C11 light chain variable complementarity determining regions 2 (CDR2) sequence
SGSTLQS

SEQ ID NO: 1350 - DNA, 96 bp, Artificial Sequence
  Mouse antibody 45C11 light chain variable framework 3 (FW3) sequence
ggaattccatcaaggttcagtggcagtggatctggtacagatttcactctcaccatcagtagcctggagcctgaagattttgcaatgtattactgt

SEQ ID NO: 1351 - protein, 32 aa, Artificial Sequence
  Mouse antibody 45C11 light chain variable framework 3 (FW3) sequence
GIPSRFSGSGSGTDFTLTISSLEPEDFAMYYC

SEQ ID NO: 1352 - DNA, 27 bp, Artificial Sequence
  Mouse antibody 45C11 light chain variable complementarity determining regions 3 (CDR3) sequence
caacagcataatgaattcccgtggacg

SEQ ID NO: 1353 - protein, 9 aa, Artificial Sequence
  Mouse antibody 45C11 light chain variable complementarity determining regions 3 (CDR3) sequence
QQHNEFPWT

SEQ ID NO: 1354 - DNA, 30 bp, Artificial Sequence; identical to SEQ ID NO: 890
  Mouse antibody 45C11 light chain variable framework 4 (FW4) sequence

SEQ ID NO: 1355 - protein, 10 aa, Artificial Sequence
  Mouse antibody 45C11 light chain variable framework 4 (FW4) sequence
FGGGTKLEIK

SEQ ID NO: 1356 - DNA, 90 bp, Artificial Sequence; identical to SEQ ID NO: 990
  Mouse 5C6F3 heavy chain variable framework 1 (FW1) sequence

SEQ ID NO: 1357 - protein, 30 aa, Artificial Sequence; identical to SEQ ID NO: 991
  Mouse 5C6F3 heavy chain variable framework 1 (FW1) sequence

SEQ ID NO: 1358 - DNA, 15 bp, Artificial Sequence
  Mouse 5C6F3 heavy chain variable complementarity determining regions 1 (CDR1) sequence
acctatgccatgtct

SEQ ID NO: 1359 - protein, 5 aa, Artificial Sequence
  Mouse 5C6F3 heavy chain variable complementarity determining regions 1 (CDR1) sequence
TYAMS

SEQ ID NO: 1360 - DNA, 42 bp, Artificial Sequence; identical to SEQ ID NO: 124
  Mouse 5C6F3 heavy chain variable framework 2 (FW2) sequence

SEQ ID NO: 1361 - protein, 14 aa, Artificial Sequence
  Mouse 5C6F3 heavy chain variable framework 2 (FW2) sequence
WVRQTPEKRLEWVA

SEQ ID NO: 1362 - DNA, 51 bp, Artificial Sequence
  Mouse 5C6F3 heavy chain variable complementarity determining regions 2 (CDR2) sequence
gccattagtaatggtggtggttacacctactatccagacagtctgaagggg

SEQ ID NO: 1363 - protein, 17 aa, Artificial Sequence
  Mouse 5C6F3 heavy chain variable complementarity determining regions 2 (CDR2) sequence
AISNGGGYTYYPDSLKG

SEQ ID NO: 1364 - DNA, 96 bp, Artificial Sequence
  Mouse 5C6F3 heavy chain variable framework 3 (FW3) sequence
cgattcaccatctccagagacaatgccaagaacaccctgtacctgcaaatgagcagtctgaggtctgaggacacggccacgtattactgtgcaaga

SEQ ID NO: 1365 - protein, 32 aa, Artificial Sequence
  Mouse 5C6F3 heavy chain variable framework 3 (FW3) sequence
RFTISRDNAKNTLYLQMSSLRSEDTATYYCAR

SEQ ID NO: 1366 - DNA, 27 bp, Artificial Sequence
  Mouse 5C6F3 heavy chain variable complementarity determining regions 3 (CDR3) sequence
cgttactatgatcactactttgactac

SEQ ID NO: 1367 - protein, 9 aa, Artificial Sequence
  Mouse 5C6F3 heavy chain variable complementarity determining regions 3 (CDR3) sequence
RYYDHYFDY

SEQ ID NO: 1368 - DNA, 33 bp, Artificial Sequence
  Mouse 5C6F3 heavy chain variable framework 4 (FW4) sequence
tggggccaaggcaccgctctcacggtctcctca

SEQ ID NO: 1369 - protein, 11 aa, Artificial Sequence
  Mouse 5C6F3 heavy chain variable framework 4 (FW4) sequence
WGQGTALTVSS

SEQ ID NO: 1370 - DNA, 69 bp, Artificial Sequence; identical to SEQ ID NO: 460
  Mouse 5C6F3 light chain variable framework 1 (FR1) sequence

SEQ ID NO: 1371 - protein, 23 aa, Artificial Sequence
  Mouse 5C6F3 light chain variable framework 1 (FR1) sequence
DVLMTQTPLSLPVSLGDQASISC

SEQ ID NO: 1372 - DNA, 48 bp, Artificial Sequence; identical to SEQ ID NO: 462
  Mouse 5C6F3 light chain variable complementarity determining regions 1 (CDR1) sequence

SEQ ID NO: 1373 - protein, 16 aa, Artificial Sequence
  Mouse 5C6F3 light chain variable complementarity determining regions 1 (CDR1) sequence
RSSQTIVHSNGNTYLE

SEQ ID NO: 1374 - DNA, 45 bp, Artificial Sequence; identical to SEQ ID NO: 464
  Mouse 5C6F3 light chain variable framework 2 (FR2) sequence

SEQ ID NO: 1375 - protein, 15 aa, Artificial Sequence
  Mouse 5C6F3 light chain variable framework 2 (FR2) sequence
WYLQKPGQSPKLLIY

SEQ ID NO: 1376 - DNA, 21 bp, Artificial Sequence
  Mouse 5C6F3 light chain variable complementarity determining regions 2 (CDR2) sequence
aaagtttccaaccgattttct

SEQ ID NO: 1377 - protein, 7 aa, Artificial Sequence
  Mouse 5C6F3 light chain variable complementarity determining regions 2 (CDR2) sequence
KVSNRFS

SEQ ID NO: 1378 - DNA, 96 bp, Artificial Sequence
  Mouse 5C6F3 light chain variable framework 3 (FR3) sequence
ggggtcccagacaggttcagtggcagtggatcagggacagatttcacactcaagatcagcagggtggaggctgaggatctgggagtttattactgc

SEQ ID NO: 1379 - protein, 32 aa, Artificial Sequence; identical to SEQ ID NO: 887
  Mouse 5C6F3 light chain variable framework 3 (FR3) sequence

SEQ ID NO: 1380 - DNA, 27 bp, Artificial Sequence
  Mouse 5C6F3 light chain variable complementarity determining regions 3 (CDR3) sequence
tttcaagattcacatgttcctctcacg

SEQ ID NO: 1381 - protein, 9 aa, Artificial Sequence
  Mouse 5C6F3 light chain variable complementarity determining regions 3 (CDR3) sequence
FQDSHVPLT

SEQ ID NO: 1382 - DNA, 30 bp, Artificial Sequence; identical to SEQ ID NO: 1018
  Mouse 5C6F3 light chain variable framework 4 (FR4) sequence

SEQ ID NO: 1383 - protein, 10 aa, Artificial Sequence
  Mouse 5C6F3 light chain variable framework 4 (FR4) sequence
FGAGTKLELK

SEQ ID NO: 1384 - DNA, 735 bp, Artificial Sequence
  mu5C6F3 scFv sequence
gaagtgatgctggtggagtctgggggaggcttagtgaagcctggagggtccctgaaactctcctgtgcagcctctggattcactttcagtacctatgccatgtcttgggttcgccagactccggagaagaggctggagtgggtcgcagccattagtaatggtggtggttacacctactatccagacagtctgaaggggcgattcaccatctccagagacaatgccaagaacaccctgtacctgcaaatgagcagtctgaggtctgaggacacggccacgtattactgtgcaagacgttactatgatcactactttgactactggggccaaggcaccgctctcacggtctcctcaggtggcggaggatctggcggaggtggaagcggcggaggcggatccgatgttttgatgacccaaactccactctccctgcctgtcagtcttggagatcaagcctccatctcttgcagatctagtcagaccattgtacatagtaatggaaacacctatttagaatggtacctgcagaaaccaggccagtctccaaagctcctgatctacaaagtttccaaccgattttctggggtcccagacaggttcagtggcagtggatcagggacagatttcacactcaagatcagcagggtggaggctgaggatctgggagtttattactgctttcaagattcacatgttcctctcacgttcggtgctgggaccaagctggagctgaaa

SEQ ID NO: 1385 - protein, 245 aa, Artificial Sequence
  mu5C6F3 scFv sequence
EVMLVESGGGLVKPGGSLKLSCAASGFTFSTYAMSWVRQTPEKRLEWVAAISNGGGYTYYPDSLKGRFTISRDNAKNTLYLQMSSLRSEDTATYYCARRYYDHYFDYWGQGTALTVSSGGGGSGGGGSGGGGSDVLMTQTPLSLPVSLGDQASISCRSSQTIVHSNGNTYLEWYLQKPGQSPKLLIYKVSNRFSGVPDRFSGSGSGTDFTLKISRVEAEDLGVYYCFQDSHVPLTFGAGTKLELK

SEQ ID NO: 1386 - DNA, 90 bp, Artificial Sequence
  Mouse 3C2B1 heavy chain variable framework 1 (CDR1) sequence
gaagtgatgctggtggagtctgggggaggcttagtgaagcctggagggtccctgaaactctcctgtgcagcctctggaatcactttcagt

SEQ ID NO: 1387 - protein, 30 aa, Artificial Sequence
  Mouse 3C2B1 heavy chain variable framework 1 (CDR1) sequence
EVMLVESGGGLVKPGGSLKLSCAASGITFS

SEQ ID NO: 1388 - DNA, 15 bp, Artificial Sequence
  Mouse 3C2B1 heavy chain variable complementarity determining regions 1 (CDR1) sequence
acctataccatgtcg

SEQ ID NO: 1389 - protein, 5 aa, Artificial Sequence
  Mouse 3C2B1 heavy chain variable complementarity determining regions 1 (CDR1) sequence
TYTMS

SEQ ID NO: 1390 - DNA, 42 bp, Artificial Sequence; identical to SEQ ID NO: 124
  Mouse 3C2B1 heavy chain variable framework 2 (CDR2) sequence

SEQ ID NO: 1391 - protein, 14 aa, Artificial Sequence
  Mouse 3C2B1 heavy chain variable framework 2 (CDR2) sequence
WVRQTPEKRLEWVA

SEQ ID NO: 1392 - DNA, 51 bp, Artificial Sequence
  Mouse 3C2B1 heavy chain variable complementarity determining regions 2 (CDR2) sequence
accattagtactggtggtgataaaacctactattcagacagtgtgaagggt

SEQ ID NO: 1393 - protein, 17 aa, Artificial Sequence
  Mouse 3C2B1 heavy chain variable complementarity determining regions 2 (CDR2) sequence
TISTGGDKTYYSDSVKG

SEQ ID NO: 1394 - DNA, 96 bp, Artificial Sequence
  Mouse 3C2B1 heavy chain variable framework 3 (CDR3) sequence
cgattcaccatctccagagacaatgccaagaacaacctgtacctccaaatgagcagtctgaggtctgaggacacggccttgtattactgtgcaagg

SEQ ID NO: 1395 - protein, 32 aa, Artificial Sequence
  Mouse 3C2B1 heavy chain variable framework 3 (CDR3) sequence
RFTISRDNAKNNLYLQMSSLRSEDTALYYCAR

SEQ ID NO: 1396 - DNA, 36 bp, Artificial Sequence
  Mouse 3C2B1 heavy chain variable complementarity determining regions 3 (CDR3) sequence
ggaaccacggctatgtattactatgctatggactac

SEQ ID NO: 1397 - protein, 12 aa, Artificial Sequence
  Mouse 3C2B1 heavy chain variable complementarity determining regions 3 (CDR3) sequence
GTTAMYYYAMDY

SEQ ID NO: 1398 - DNA, 33 bp, Artificial Sequence; identical to SEQ ID NO: 1210
  Mouse 3C2B1 heavy chain variable framework 4 (CDR4) sequence

SEQ ID NO: 1399 - protein, 11 aa, Artificial Sequence
  Mouse 3C2B1 heavy chain variable framework 4 (CDR4) sequence
WGQGTSVTVSS

SEQ ID NO: 1400 - DNA, 69 bp, Artificial Sequence
  Mouse 3C2B1 light chain variable framework 1 (FW1) sequence
gacattgtgctgacacagtctcctgcttccttagctgtatctctggggcagagggccaccatctcatgc

SEQ ID NO: 1401 - protein, 23 aa, Artificial Sequence
  Mouse 3C2B1 light chain variable framework 1 (FW1) sequence
DIVLTQSPASLAVSLGQRATISC

SEQ ID NO: 1402 - DNA, 45 bp, Artificial Sequence
  Mouse 3C2B1 light chain variable complementarity determining regions 1 (CDR1) sequence
agggccagcaaaagtatcagtacatctgactataattatattcac

SEQ ID NO: 1403 - protein, 15 aa, Artificial Sequence
  Mouse 3C2B1 light chain variable complementarity determining regions 1 (CDR1) sequence
RASKSISTSDYNYIH

SEQ ID NO: 1404 - DNA, 45 bp, Artificial Sequence
  Mouse 3C2B1 light chain variable framework 2 (FW2) sequence
tggtaccaacagaaaccaggacagccacccaaactcctcatctat

SEQ ID NO: 1405 - protein, 15 aa, Artificial Sequence
  Mouse 3C2B1 light chain variable framework 2 (FW2) sequence
WYQQKPGQPPKLLIY

SEQ ID NO: 1406 - DNA, 21 bp, Artificial Sequence
  Mouse 3C2B1 light chain variable complementarity determining regions 2 (CDR2) sequence
cttgcatccaacctagaatct

SEQ ID NO: 1407 - protein, 7 aa, Artificial Sequence
  Mouse 3C2B1 light chain variable complementarity determining regions 2 (CDR2) sequence
LASNLES

SEQ ID NO: 1408 - DNA, 95 bp, Artificial Sequence
  Mouse 3C2B1 light chain variable framework 3 (FW3) sequence
gggtccctgccaggttcagtggcagtgggtctgggacagacttcaccctcaacatccatcctgtggaggaagaagatgctgcaacctattactgt

SEQ ID NO: 1409 - protein, 32 aa, Artificial Sequence; identical to SEQ ID NO: 179
  Mouse 3C2B1 light chain variable framework 3 (FW3) sequence

SEQ ID NO: 1410 - DNA, 27 bp, Artificial Sequence
  Mouse 3C2B1 light chain variable complementarity determining regions 3 (CDR3) sequence
cagcacagtagggagcttcctctcacg

SEQ ID NO: 1411 - protein, 9 aa, Artificial Sequence
  Mouse 3C2B1 light chain variable complementarity determining regions 3 (CDR3) sequence
QHSRELPLT

SEQ ID NO: 1412 - DNA, 30 bp, Artificial Sequence; identical to SEQ ID NO: 1018
  Mouse 3C2B1 light chain variable framework 4 (FW4) sequence

SEQ ID NO: 1413 - protein, 10 aa, Artificial Sequence
  Mouse 3C2B1 light chain variable framework 4 (FW4) sequence
FGAGTKLELK

SEQ ID NO: 1414 - DNA, 90 bp, Artificial Sequence
  Mouse B12 heavy chain variable framework 1 (FW1) sequence
caggcgcagctgaaggagtcaggacctggcctggtggcgccctcacagagcctgtccatcacttgcactgtctctgggttttcattaacc

SEQ ID NO: 1415 - protein, 30 aa, Artificial Sequence
  Mouse B12 heavy chain variable framework 1 (FW1) sequence
QAQLKESGPGLVAPSQSLSITCTVSGFSLT

SEQ ID NO: 1416 - DNA, 15 bp, Artificial Sequence
  Mouse B12 heavy chain variable complementarity determining regions 1 (CDR1) sequence
agctatggtgtacac

SEQ ID NO: 1417 - protein, 5 aa, Artificial Sequence
  Mouse B12 heavy chain variable complementarity determining regions 1 (CDR1) sequence
SYGVH

SEQ ID NO: 1418 - DNA, 42 bp, Artificial Sequence
  Mouse B12 heavy chain variable framework 2 (FW2) sequence
tgggttcgccagcctccaggaaagggtctggagtggctggga

SEQ ID NO: 1419 - protein, 14 aa, Artificial Sequence
  Mouse B12 heavy chain variable framework 2 (FW2) sequence
WVRQPPGKGLEWLG

SEQ ID NO: 1420 - DNA, 54 bp, Artificial Sequence
  Mouse B12 heavy chain variable complementarity determining regions 2 (CDR2) sequence
gtaatatggcctggtggaagcacaaattataattcgactctcatgtccagaatg

SEQ ID NO: 1421 - protein, 18 aa, Artificial Sequence
  Mouse B12 heavy chain variable complementarity determining regions 2 (CDR2) sequence
VIWPGGSTNYNSTLMSRM

SEQ ID NO: 1422 - DNA, 90 bp, Artificial Sequence
  Mouse B12 heavy chain variable framework 3 (FW3) sequence
cggatcatcaaagacaactccaagagccaagttttcttaaaaatgaacagtctgcaaattgatgacacagccatgtactactgtgccaga

SEQ ID NO: 1423 - protein, 30 aa, Artificial Sequence
  Mouse B12 heavy chain variable framework 3 (FW3) sequence
RIIKDNSKSQVFLKMNSLQIDDTAMYYCAR

SEQ ID NO: 1424 - DNA, 36 bp, Artificial Sequence
  Mouse B12 heavy chain variable complementarity determining regions 3 (CDR3) sequence
gatcggacacctcgggtgggggcctggtttgcttac

SEQ ID NO: 1425 - protein, 12 aa, Artificial Sequence
  Mouse B12 heavy chain variable complementarity determining regions 3 (CDR3) sequence
DRTPRVGAWFAY

SEQ ID NO: 1426 - DNA, 34 bp, Artificial Sequence
  Mouse B12 heavy chain variable framework 4 (FW4) sequence
tggggccaagggactctggtcactgtctctgcag

SEQ ID NO: 1427 - protein, 11 aa, Artificial Sequence
  Mouse B12 heavy chain variable framework 4 (FW4) sequence
WGQGTLVTVSA

SEQ ID NO: 1428 - DNA, 69 bp, Artificial Sequence
  Mouse B12 light chain variable framework 1 (FR1) sequence
atcattgtgctgacccaatctccagcttctttggctgtgtctctagggcagagggccaccatatcctgc

SEQ ID NO: 1429 - protein, 23 aa, Artificial Sequence
  Mouse B12 light chain variable framework 1 (FR1) sequence
IIVLTQSPASLAVSLGQRATISC

SEQ ID NO: 1430 - DNA, 45 bp, Artificial Sequence
  Mouse B12 light chain variable complementarity determining regions 1 (CDR1) sequence
agagccagtgagagtgttgctacttatggcaataattttatgcag

SEQ ID NO: 1431 - protein, 15 aa, Artificial Sequence
  Mouse B12 light chain variable complementarity determining regions 1 (CDR1) sequence
RASESVATYGNNFMQ

SEQ ID NO: 1432 - DNA, 90 bp, Artificial Sequence
  Mouse B2 heavy chain variable framework 1 (FW1) sequence
gaagtggtgctggtggagtctgggggaggcttagtggagcctggagggtccctgaaactctcctgtgtagcctctggattcgctttcagt

SEQ ID NO: 1433 - protein, 30 aa, Artificial Sequence
  Mouse B2 heavy chain variable framework 1 (FW1) sequence
EVVLVESGGGLVEPGGSLKLSCVASGFAFS

SEQ ID NO: 1434 - DNA, 15 bp, Artificial Sequence
  Mouse B2 heavy chain variable complementarity determining regions 1 (CDR1) sequence
acctttgccatgtct

SEQ ID NO: 1435 - protein, 5 aa, Artificial Sequence
  Mouse B2 heavy chain variable complementarity determining regions 1 (CDR1) sequence
TFAMS

SEQ ID NO: 1436 - DNA, 42 bp, Artificial Sequence
  Mouse B2 heavy chain variable framework 2 (FW2) sequence
tggattcgccagactccggagaagaggctggagtgggtcgca

SEQ ID NO: 1437 - protein, 14 aa, Artificial Sequence
  Mouse B2 heavy chain variable framework 2 (FW2) sequence
WIRQTPEKRLEWVA

SEQ ID NO: 1438 - DNA, 51 bp, Artificial Sequence
  Mouse B2 heavy chain variable complementarity determining regions 2 (CDR2) sequence
gccattagtaatggtggtggttacacctactatccagacactctgaagggg

SEQ ID NO: 1439 - protein, 17 aa, Artificial Sequence
  Mouse B2 heavy chain variable complementarity determining regions 2 (CDR2) sequence
AISNGGGYTYYPDTLKG

SEQ ID NO: 1440 - DNA, 96 bp, Artificial Sequence
  Mouse B2 heavy chain variable framework 3 (FW3) sequence
cgattctccatctccagagacaatgccaagaataccctgtacctgcaaatgagtagtctgaggtctgaggacacggccgtgtattactgtgcaaga

SEQ ID NO: 1441 - protein, 32 aa, Artificial Sequence
  Mouse B2 heavy chain variable framework 3 (FW3) sequence
RFSISRDNAKNTLYLQMSSLRSEDTAVYYCAR

SEQ ID NO: 1442 - DNA, 27 bp, Artificial Sequence
  Mouse B2 heavy chain variable complementarity determining regions 3 (CDR3) sequence
cgctactatgatctctactttgactta

SEQ ID NO: 1443 - protein, 9 aa, Artificial Sequence
  Mouse B2 heavy chain variable complementarity determining regions 3 (CDR3) sequence
RYYDLYFDL

SEQ ID NO: 1444 - DNA, 33 bp, Artificial Sequence
  Mouse B2 heavy chain variable framework 4 (FW4) sequence
tggggccgaggcacctctctcatagtctcctca

SEQ ID NO: 1445 - protein, 11 aa, Artificial Sequence
  Mouse B2 heavy chain variable framework 4 (FW4) sequence
WGRGTSLIVSS

SEQ ID NO: 1446 - DNA, 69 bp, Artificial Sequence
  Mouse B2 light chain variable framework 1 (FR1) sequence
gatattctgatgacccaaactccactctccctgcctgtcagtcttggagatcaagcctccatttcttgc

SEQ ID NO: 1447 - protein, 23 aa, Artificial Sequence
  Mouse B2 light chain variable framework 1 (FR1) sequence
DILMTQTPLSLPVSLGDQASISC

SEQ ID NO: 1448 - DNA, 48 bp, Artificial Sequence
  Mouse B2 light chain variable complementarity determining regions 1 (CDR1) sequence
agatctagtcagaacattgtacatagtaatggaaacacctatttagaa

SEQ ID NO: 1449 - protein, 16 aa, Artificial Sequence
  Mouse B2 light chain variable complementarity determining regions 1 (CDR1) sequence
RSSQNIVHSNGNTYLE

SEQ ID NO: 1450 - DNA, 45 bp, Artificial Sequence; identical to SEQ ID NO: 464
  Mouse B2 light chain variable framework 2 (FR2) sequence

SEQ ID NO: 1451 - protein, 15 aa, Artificial Sequence
  Mouse B2 light chain variable framework 2 (FR2) sequence
WYLQKPGQSPKLLIY

SEQ ID NO: 1452 - DNA, 21 bp, Artificial Sequence
  Mouse B2 light chain variable complementarity determining regions 2 (CDR2) sequence
aaagtttccaaccgattttct

SEQ ID NO: 1453 - protein, 7 aa, Artificial Sequence
  Mouse B2 light chain variable complementarity determining regions 2 (CDR2) sequence
KVSNRFS

SEQ ID NO: 1454 - DNA, 96 bp, Artificial Sequence
  Mouse B2 light chain variable framework 3 (FR3) sequence
ggggtccccgacaggttcagtggtagtgggtcagggacagatttcacactcaagatcagcagagtggaggctgaggatctgggagtttattactgc

SEQ ID NO: 1455 - protein, 32 aa, Artificial Sequence; identical to SEQ ID NO: 887
  Mouse B2 light chain variable framework 3 (FR3) sequence

SEQ ID NO: 1456 - DNA, 27 bp, Artificial Sequence
  Mouse B2 light chain variable complementarity determining regions 3 (CDR3) sequence
tttcaagattcacatgttcctctcacg

SEQ ID NO: 1457 - protein, 9 aa, Artificial Sequence
  Mouse B2 light chain variable complementarity determining regions 3 (CDR3) sequence
FQDSHVPLT

SEQ ID NO: 1458 - DNA, 30 bp, Artificial Sequence
  Mouse B2 light chain variable framework 4 (FR4) sequence
ttcggtgctgggaccaggctggagctgaaa

SEQ ID NO: 1459 - protein, 10 aa, Artificial Sequence
  Mouse B2 light chain variable framework 4 (FR4) sequence
FGAGTRLELK

SEQ ID NO: 1460 - DNA, 90 bp, Artificial Sequence
  Mouse B7 heavy chain variable framework 1 (FW1) sequence
gaggtgcaggtggtggagtctgggggagacttagtgaagcctggagggtccctgaaactctcctgtgcagcctctggattcactttcagt

SEQ ID NO: 1461 - protein, 30 aa, Artificial Sequence
  Mouse B7 heavy chain variable framework 1 (FW1) sequence
EVQVVESGGDLVKPGGSLKLSCAASGFTFS

SEQ ID NO: 1462 - DNA, 15 bp, Artificial Sequence
  Mouse B7 heavy chain variable complementarity determining regions 1 (CDR1) sequence
agatatggcatgtct

SEQ ID NO: 1463 - protein, 5 aa, Artificial Sequence
  Mouse B7 heavy chain variable complementarity determining regions 1 (CDR1) sequence
RYGMS

SEQ ID NO: 1464 - DNA, 42 bp, Artificial Sequence; identical to SEQ ID NO: 1026
  Mouse B7 heavy chain variable framework 2 (FW2) sequence

SEQ ID NO: 1465 - protein, 14 aa, Artificial Sequence
  Mouse B7 heavy chain variable framework 2 (FW2) sequence
WVRQTPDKRLEWVA

SEQ ID NO: 1466 - DNA, 51 bp, Artificial Sequence
  Mouse B7 heavy chain variable complementarity determining regions 2 (CDR2) sequence
accattagtagtggtggtacttacatctactatccagacagtgtgaagggg

SEQ ID NO: 1467 - protein, 17 aa, Artificial Sequence
  Mouse B7 heavy chain variable complementarity determining regions 2 (CDR2) sequence
TISSGGTYIYYPDSVKG

SEQ ID NO: 1468 - DNA, 96 bp, Artificial Sequence
  Mouse B7 heavy chain variable framework 3 (FW3) sequence
cgattcaccatctccagagacaatgccaagaacaccctgtacctgcaaatgagcagtctgaagtctgaggacacagccatgtattactgtgcaagg

SEQ ID NO: 1469 - protein, 32 aa, Artificial Sequence
  Mouse B7 heavy chain variable framework 3 (FW3) sequence
RFTISRDNAKNTLYLQMSSLKSEDTAMYYCAR

SEQ ID NO: 1470 - DNA, 39 bp, Artificial Sequence
  Mouse B7 heavy chain variable complementarity determining regions 3 (CDR3) sequence
gataactacggtagtagctacgactatgctatggactac

SEQ ID NO: 1471 - protein, 13 aa, Artificial Sequence
  Mouse B7 heavy chain variable complementarity determining regions 3 (CDR3) sequence
DNYGSSYDYAMDY

SEQ ID NO: 1472 - DNA, 33 bp, Artificial Sequence; identical to SEQ ID NO: 1210
  Mouse B7 heavy chain variable framework 4 (FW4) sequence

SEQ ID NO: 1473 - protein, 11 aa, Artificial Sequence
  Mouse B7 heavy chain variable framework 4 (FW4) sequence
WGQGTSVTVSS

SEQ ID NO: 1474 - DNA, 69 bp, Artificial Sequence; identical to SEQ ID NO: 460
  Mouse B7 light chain variable framework 1 (FR1) sequence

SEQ ID NO: 1475 - protein, 23 aa, Artificial Sequence
  Mouse B7 light chain variable framework 1 (FR1) sequence
DVLMTQTPLSLPVSLGDQASISC

SEQ ID NO: 1476 - DNA, 48 bp, Artificial Sequence; identical to SEQ ID NO: 462
  Mouse B7 light chain variable complementarity determining regions 1 (CDR1) sequence

SEQ ID NO: 1477 - protein, 16 aa, Artificial Sequence
  Mouse B7 light chain variable complementarity determining regions 1 (CDR1) sequence
RSSQTIVHSNGNTYLE

SEQ ID NO: 1478 - DNA, 45 bp, Artificial Sequence
  Mouse B7 light chain variable framework 2 (FR2) sequence
tggtacctgcaaaaaccaggccagtctccaaagctcctgatctac

SEQ ID NO: 1479 - protein, 15 aa, Artificial Sequence
  Mouse B7 light chain variable framework 2 (FR2) sequence
WYLQKPGQSPKLLIY

SEQ ID NO: 1480 - DNA, 21 bp, Artificial Sequence
  Mouse B7 light chain variable complementarity determining regions 2 (CDR2) sequence
aaagtttccaaccgattttct

SEQ ID NO: 1481 - protein, 7 aa, Artificial Sequence
  Mouse B7 light chain variable complementarity determining regions 2 (CDR2) sequence
KVSNRFS

SEQ ID NO: 1482 - DNA, 96 bp, Artificial Sequence; identical to SEQ ID NO: 1378
  Mouse B7 light chain variable framework 3 (FR3) sequence

SEQ ID NO: 1483 - protein, 32 aa, Artificial Sequence; identical to SEQ ID NO: 887
  Mouse B7 light chain variable framework 3 (FR3) sequence

SEQ ID NO: 1484 - DNA, 27 bp, Artificial Sequence
  Mouse B7 light chain variable complementarity determining regions 3 (CDR3) sequence
tttcaagattcacatgttcctctcacg

SEQ ID NO: 1485 - protein, 9 aa, Artificial Sequence
  Mouse B7 light chain variable complementarity determining regions 3 (CDR3) sequence
FQDSHVPLT

SEQ ID NO: 1486 - DNA, 30 bp, Artificial Sequence; identical to SEQ ID NO: 1018
  Mouse B7 light chain variable framework 4 (FR4) sequence

SEQ ID NO: 1487 - protein, 10 aa, Artificial Sequence
  Mouse B7 light chain variable framework 4 (FR4) sequence
FGAGTKLELK

SEQ ID NO: 1488 - DNA, 90 bp, Artificial Sequence; identical to SEQ ID NO: 990
  Mouse 8C7F3 heavy chain variable framework 1 (FW1) sequence

SEQ ID NO: 1489 - protein, 30 aa, Artificial Sequence; identical to SEQ ID NO: 991
  Mouse 8C7F3 heavy chain variable framework 1 (FW1) sequence

SEQ ID NO: 1490 - DNA, 15 bp, Artificial Sequence
  Mouse 8C7F3 heavy chain variable complementarity determining regions 1 (CDR1) sequence
acctatgccatgtct

SEQ ID NO: 1491 - protein, 5 aa, Artificial Sequence
  Mouse 8C7F3 heavy chain variable complementarity determining regions 1 (CDR1) sequence
TYAMS

SEQ ID NO: 1492 - DNA, 42 bp, Artificial Sequence; identical to SEQ ID NO: 124
  Mouse 8C7F3 heavy chain variable framework 2 (FW2) sequence

SEQ ID NO: 1493 - protein, 14 aa, Artificial Sequence
  Mouse 8C7F3 heavy chain variable framework 2 (FW2) sequence
WVRQTPEKRLEWVA

SEQ ID NO: 1494 - DNA, 51 bp, Artificial Sequence; identical to SEQ ID NO: 1362
  Mouse 8C7F3 heavy chain variable complementarity determining regions 2 (CDR2) sequence

SEQ ID NO: 1495 - protein, 17 aa, Artificial Sequence
  Mouse 8C7F3 heavy chain variable complementarity determining regions 2 (CDR2) sequence
AISNGGGYTYYPDSLKG

SEQ ID NO: 1496 - DNA, 96 bp, Artificial Sequence; identical to SEQ ID NO: 1364
  Mouse 8C7F3 heavy chain variable framework 3 (FW3) sequence

SEQ ID NO: 1497 - protein, 32 aa, Artificial Sequence; identical to SEQ ID NO: 1365
  Mouse 8C7F3 heavy chain variable framework 3 (FW3) sequence

SEQ ID NO: 1498 - DNA, 27 bp, Artificial Sequence
  Mouse 8C7F3 heavy chain variable complementarity determining regions 3 (CDR3) sequence
cgttactatgatcactactttgactac

SEQ ID NO: 1499 - protein, 9 aa, Artificial Sequence
  Mouse 8C7F3 heavy chain variable complementarity determining regions 3 (CDR3) sequence
RYYDHYFDY

SEQ ID NO: 1500 - DNA, 33 bp, Artificial Sequence; identical to SEQ ID NO: 1368
  Mouse 8C7F3 heavy chain variable framework 4 (FW4) sequence

SEQ ID NO: 1501 - protein, 11 aa, Artificial Sequence
  Mouse 8C7F3 heavy chain variable framework 4 (FW4) sequence
WGQGTALTVSS

SEQ ID NO: 1502 - DNA, 69 bp, Artificial Sequence; identical to SEQ ID NO: 1428
  Mouse 8C7F3 light chain variable framework 1 (FR1) sequence

SEQ ID NO: 1503 - protein, 23 aa, Artificial Sequence
  Mouse 8C7F3 light chain variable framework 1 (FR1) sequence
IIVLTQSPASLAVSLGQRATISC

SEQ ID NO: 1504 - DNA, 45 bp, Artificial Sequence; identical to SEQ ID NO: 1430
  Mouse 8C7F3 light chain variable complementarity determining regions 1 (CDR1) sequence

SEQ ID NO: 1505 - protein, 15 aa, Artificial Sequence
  Mouse 8C7F3 light chain variable complementarity determining regions 1 (CDR1) sequence
RASESVATYGNNFMQ

SEQ ID NO: 1506 - DNA, 45 bp, Artificial Sequence
  Mouse 8C7F3 light chain variable framework 2 (FR2) sequence
tggtatcagcagaaaccaggacagccacccaaactcctcatctat

SEQ ID NO: 1507 - protein, 15 aa, Artificial Sequence
  Mouse 8C7F3 light chain variable framework 2 (FR2) sequence
WYQQKPGQPPKLLIY

SEQ ID NO: 1508 - DNA, 21 bp, Artificial Sequence
  Mouse 8C7F3 light chain variable complementarity determining regions 2 (CDR2) sequence
cttgcatccaccctagattct

SEQ ID NO: 1509 - protein, 7 aa, Artificial Sequence
  Mouse 8C7F3 light chain variable complementarity determining regions 2 (CDR2) sequence
LASTLDS

SEQ ID NO: 1510 - DNA, 96 bp, Artificial Sequence
  Mouse 8C7F3 light chain variable framework 3 (FR3) sequence
ggggtccctgccaggttcagtggcagtgggtctaggacagacttcaccctcaccattgatcctgtggaggctgatgatgctgcaacctattactgt

SEQ ID NO: 1511 - protein, 32 aa, Artificial Sequence
  Mouse 8C7F3 light chain variable framework 3 (FR3) sequence
GVPARFSGSGSRTDFTLTIDPVEADDAATYYC

SEQ ID NO: 1512 - DNA, 27 bp, Artificial Sequence
  Mouse 8C7F3 light chain variable complementarity determining regions 3 (CDR3) sequence
cagcaaaataatgaggatcctccgacg

SEQ ID NO: 1513 - protein, 9 aa, Artificial Sequence
  Mouse 8C7F3 light chain variable complementarity determining regions 3 (CDR3) sequence
QQNNEDPPT

SEQ ID NO: 1514 - DNA, 30 bp, Artificial Sequence
  Mouse 8C7F3 light chain variable framework 4 (FR4) sequence
ttcggtggaggcaccaagctggaaatcaag

SEQ ID NO: 1515 - protein, 10 aa, Artificial Sequence
  Mouse 8C7F3 light chain variable framework 4 (FR4) sequence
FGGGTKLEIK

SEQ ID NO: 1516 - DNA, 90 bp, Artificial Sequence
  Mouse H11 heavy chain variable framework 1 (FW1) sequence
gaagtggtgctggtggagtctgggggaggcttagtggagcctggagggtccctgaaactctcctgtgtagcctctggattcgcttttagt

SEQ ID NO: 1517 - protein, 30 aa, Artificial Sequence; identical to SEQ ID NO: 1433
  Mouse H11 heavy chain variable framework 1 (FW1) sequence

SEQ ID NO: 1518 - DNA, 15 bp, Artificial Sequence
  Mouse H11 heavy chain variable complementarity determining regions 1 (CDR1) sequence
acctttgccatgtct

SEQ ID NO: 1519 - protein, 5 aa, Artificial Sequence
  Mouse H11 heavy chain variable complementarity determining regions 1 (CDR1) sequence
TFAMS

SEQ ID NO: 1520 - DNA, 42 bp, Artificial Sequence; identical to SEQ ID NO: 1436
  Mouse H11 heavy chain variable framework 2 (FW2) sequence

SEQ ID NO: 1521 - protein, 14 aa, Artificial Sequence
  Mouse H11 heavy chain variable framework 2 (FW2) sequence
WIRQTPEKRLEWVA

SEQ ID NO: 1522 - DNA, 51 bp, Artificial Sequence
  Mouse H11 heavy chain variable complementarity determining regions 2 (CDR2) sequence
gccattagtaatggtggtggttacacttactatccagacactctgaagggg

SEQ ID NO: 1523 - protein, 17 aa, Artificial Sequence
  Mouse H11 heavy chain variable complementarity determining regions 2 (CDR2) sequence
AISNGGGYTYYPDTLKG

SEQ ID NO: 1524 - DNA, 96 bp, Artificial Sequence
  Mouse H11 heavy chain variable framework 3 (FW3) sequence
cgattcaccatctccagagacaatgccaagaataccctgtacctgcaaatgagtagtctgaggtctgaggacacggccgtgtattactgtgcaaga

SEQ ID NO: 1525 - protein, 32 aa, Artificial Sequence
  Mouse H11 heavy chain variable framework 3 (FW3) sequence
RFTISRDNAKNTLYLQMSSLRSEDTAVYYCAR

SEQ ID NO: 1526 - DNA, 27 bp, Artificial Sequence
  Mouse H11 heavy chain variable complementarity determining regions 3 (CDR3) sequence
cgctactatgatctctactttgactta

SEQ ID NO: 1527 - protein, 9 aa, Artificial Sequence
  Mouse H11 heavy chain variable complementarity determining regions 3 (CDR3) sequence
RYYDLYFDL

SEQ ID NO: 1528 - DNA, 33 bp, Artificial Sequence
  Mouse H11 heavy chain variable framework 4 (FW4) sequence
tggggccaaggcacctctctcatagtctcctca

SEQ ID NO: 1529 - protein, 11 aa, Artificial Sequence
  Mouse H11 heavy chain variable framework 4 (FW4) sequence
WGQGTSLIVSS

SEQ ID NO: 1530 - DNA, 69 bp, Artificial Sequence; identical to SEQ ID NO: 1446
  Mouse H11 light chain variable framework 1 (FR1) sequence

SEQ ID NO: 1531 - protein, 23 aa, Artificial Sequence
  Mouse H11 light chain variable framework 1 (FR1) sequence
DILMTQTPLSLPVSLGDQASISC

SEQ ID NO: 1532 - DNA, 48 bp, Artificial Sequence; identical to SEQ ID NO: 1448
  Mouse H11 light chain variable complementarity determining regions 1 (CDR1) sequence

SEQ ID NO: 1533 - protein, 16 aa, Artificial Sequence
  Mouse H11 light chain variable complementarity determining regions 1 (CDR1) sequence
RSSQNIVHSNGNTYLE

SEQ ID NO: 1534 - DNA, 45 bp, Artificial Sequence; identical to SEQ ID NO: 464
  Mouse H11 light chain variable framework 2 (FR2) sequence

SEQ ID NO: 1535 - protein, 15 aa, Artificial Sequence
  Mouse H11 light chain variable framework 2 (FR2) sequence
WYLQKPGQSPKLLIY

SEQ ID NO: 1536 - DNA, 21 bp, Artificial Sequence
  Mouse H11 light chain variable complementarity determining regions 2 (CDR2) sequence
aaagtttccaaccgattttct

SEQ ID NO: 1537 - protein, 7 aa, Artificial Sequence
  Mouse H11 light chain variable complementarity determining regions 2 (CDR2) sequence
KVSNRFS

SEQ ID NO: 1538 - DNA, 96 bp, Artificial Sequence; identical to SEQ ID NO: 1454
  Mouse H11 light chain variable framework 3 (FR3) sequence

SEQ ID NO: 1539 - protein, 32 aa, Artificial Sequence; identical to SEQ ID NO: 887
  Mouse H11 light chain variable framework 3 (FR3) sequence

SEQ ID NO: 1540 - DNA, 27 bp, Artificial Sequence
  Mouse H11 light chain variable complementarity determining regions 3 (CDR3) sequence
tttcaagattcacatgttcctctcacg

SEQ ID NO: 1541 - protein, 9 aa, Artificial Sequence
  Mouse H11 light chain variable complementarity determining regions 3 (CDR3) sequence
FQDSHVPLT

SEQ ID NO: 1542 - DNA, 30 bp, Artificial Sequence; identical to SEQ ID NO: 1458
  Mouse H11 light chain variable framework 4 (FR4) sequence

SEQ ID NO: 1543 - protein, 10 aa, Artificial Sequence
  Mouse H11 light chain variable framework 4 (FR4) sequence
FGAGTRLELK

SEQ ID NO: 1544 - DNA, 90 bp, Artificial Sequence; identical to SEQ ID NO: 1460
  Mouse B9 heavy chain variable framework 1 (FW1) sequence

SEQ ID NO: 1545 - protein, 30 aa, Artificial Sequence; identical to SEQ ID NO: 1461
  Mouse B9 heavy chain variable framework 1 (FW1) sequence

SEQ ID NO: 1546 - DNA, 15 bp, Artificial Sequence
  Mouse B9 heavy chain variable complementarity determining regions 1 (CDR1) sequence
agatatggcatgtct

SEQ ID NO: 1547 - protein, 5 aa, Artificial Sequence
  Mouse B9 heavy chain variable complementarity determining regions 1 (CDR1) sequence
RYGMS

SEQ ID NO: 1548 - DNA, 42 bp, Artificial Sequence; identical to SEQ ID NO: 1026
  Mouse B9 heavy chain variable framework 2 (FW2) sequence

SEQ ID NO: 1549 - protein, 14 aa, Artificial Sequence
  Mouse B9 heavy chain variable framework 2 (FW2) sequence
WVRQTPDKRLEWVA

SEQ ID NO: 1550 - DNA, 51 bp, Artificial Sequence; identical to SEQ ID NO: 1466
  Mouse B9 heavy chain variable complementarity determining regions 2 (CDR2) sequence

SEQ ID NO: 1551 - protein, 17 aa, Artificial Sequence
  Mouse B9 heavy chain variable complementarity determining regions 2 (CDR2) sequence
TISSGGTYIYYPDSVKG

SEQ ID NO: 1552 - DNA, 93 bp, Artificial Sequence
  Mouse B9 heavy chain variable framework 3 (FW3) sequence
cgattcaccatctccagagacaatgccaagaacaccctgtacctgcaaatgagcagtctgaagtctgaggacacagccatgtattactgtgca

SEQ ID NO: 1553 - protein, 32 aa, Artificial Sequence; identical to SEQ ID NO: 1469
  Mouse B9 heavy chain variable framework 3 (FW3) sequence

SEQ ID NO: 1554 - DNA, 42 bp, Artificial Sequence
  Mouse B9 heavy chain variable complementarity determining regions 3 (CDR3) sequence
agggataactacggtagtagctacgactatgctatggactac

SEQ ID NO: 1555 - protein, 13 aa, Artificial Sequence
  Mouse B9 heavy chain variable complementarity determining regions 3 (CDR3) sequence
DNYGSSYDYAMDY

SEQ ID NO: 1556 - DNA, 33 bp, Artificial Sequence
  Mouse B9 heavy chain variable framework 4 (FW4) sequence
tggggtcaaggaacctcagtcaccgtctcctct

SEQ ID NO: 1557 - protein, 11 aa, Artificial Sequence
  Mouse B9 heavy chain variable framework 4 (FW4) sequence
WGQGTSVTVSS

SEQ ID NO: 1558 - DNA, 69 bp, Artificial Sequence; identical to SEQ ID NO: 67
  Mouse B9 light chain variable framework 1 (FR1) sequence

SEQ ID NO: 1559 - protein, 23 aa, Artificial Sequence
  Mouse B9 light chain variable framework 1 (FR1) sequence
QIVLTQSPAIMSASPGEEVTLTC

SEQ ID NO: 1560 - DNA, 30 bp, Artificial Sequence
  Mouse B9 light chain variable complementarity determining regions 1 (CDR1) sequence
agtgccagctcaagtgtaagttacatgcac

SEQ ID NO: 1561 - protein, 10 aa, Artificial Sequence
  Mouse B9 light chain variable complementarity determining regions 1 (CDR1) sequence
SASSSVSYMH

SEQ ID NO: 1562 - DNA, 45 bp, Artificial Sequence; identical to SEQ ID NO: 71
  Mouse B9 light chain variable framework 2 (FR2) sequence

SEQ ID NO: 1563 - protein, 15 aa, Artificial Sequence
  Mouse B9 light chain variable framework 2 (FR2) sequence
WFQQRPGTSPKLWIY

SEQ ID NO: 1564 - DNA, 21 bp, Artificial Sequence
  Mouse B9 light chain variable complementarity determining regions 2 (CDR2) sequence
accacatccaacctggcttct

SEQ ID NO: 1565 - protein, 7 aa, Artificial Sequence
  Mouse B9 light chain variable complementarity determining regions 2 (CDR2) sequence
TTSNLAS

SEQ ID NO: 1566 - DNA, 96 bp, Artificial Sequence
  Mouse B9 light chain variable framework 3 (FR3) sequence
ggagtccctgctcgcttcagtggcagtggatctgggacctcttactctctcacaatcagccgaatggaggctgaagatgctgccacttattactgc

SEQ ID NO: 1567 - protein, 32 aa, Artificial Sequence
  Mouse B9 light chain variable framework 3 (FR3) sequence
GVPARFSGSGSGTSYSLTISRMEAEDAATYYC

SEQ ID NO: 1568 - DNA, 24 bp, Artificial Sequence
  Mouse B9 light chain variable complementarity determining regions 3 (CDR3) sequence
cagcaaaggagtagttacccattc

SEQ ID NO: 1569 - protein, 8 aa, Artificial Sequence
  Mouse B9 light chain variable complementarity determining regions 3 (CDR3) sequence
QQRSSYPF

SEQ ID NO: 1570 - DNA, 33 bp, Artificial Sequence
  Mouse B9 light chain variable framework 4 (FR4) sequence
acgttcggctcggggacaaagttggaaataaaa

SEQ ID NO: 1571 - protein, 11 aa, Artificial Sequence
  Mouse B9 light chain variable framework 4 (FR4) sequence
TFGSGTKLEIK

SEQ ID NO: 1572 - DNA, 741 bp, Artificial Sequence
  mu3C2B1 scFv sequence
gaagtgatgctggtggagtctgggggaggcttagtgaagcctggagggtccctgaaactctcctgtgcagcctctggaatcactttcagtacctataccatgtcgtgggttcgccagactccggagaagaggctggagtgggtcgcaaccattagtactggtggtgataaaacctactattcagacagtgtgaagggtcgattcaccatctccagagacaatgccaagaacaacctgtacctccaaatgagcagtctgaggtctgaggacacggccttgtattactgtgcaaggggaaccacggctatgtattactatgctatggactactggggtcaaggaacctcagtcaccgtctcctcaggtggcggaggatctggcggaggtggaagcggcggaggcggatccgacattgtgctgacacagtctcctgcttccttagctgtatctctggggcagagggccaccatctcatgcagggccagcaaaagtatcagtacatctgactataattatattcactggtaccaacagaaaccaggacagccacccaaactcctcatctatcttgcatccaacctagaatctggggtccctgccaggttcagtggcagtgggtctgggacagacttcaccctcaacatccatcctgtggaggaagaagatgctgcaacctattactgtcagcacagtagggagcttcctctcacgttcggtgctgggaccaagctggagctgaaa

SEQ ID NO: 1573 - protein, 247 aa, Artificial Sequence
  mu3C2B1 scFv sequence
EVMLVESGGGLVKPGGSLKLSCAASGITFSTYTMSWVRQTPEKRLEWVATISTGGDKTYYSDSVKGRFTISRDNAKNNLYLQMSSLRSEDTALYYCARGTTAMYYYAMDYWGQGTSVTVSSGGGGSGGGGSGGGGSDIVLTQSPASLAVSLGQRATISCRASKSISTSDYNYIHWYQQKPGQPPKLLIYLASNLESGVPARFSGSGSGTDFTLNIHPVEEEDAATYYCQHSRELPLTFGAGTKLELK

SEQ ID NO: 1574 - DNA, 741 bp, Artificial Sequence
  mu20A10 scFv full sequence
gaagtgatgctggtggaatctggcggcggactggttaagcctggcggatctctgaagctgagctgtgccgccagcggcttcacctttagcacatacgccatgagctggatccggcagacccctgagaagagactggaatgggttgccagcatcggcagagccggcagcacctactacagcgattctgtgaagggcagattcaccatcagccgggacaacgtgcggaacatcctgtacctgcagatgagcagcctgcggagcgaggataccgccatgtactactgtgccagaggacccatctacaacgactacgacgagttcgcctattggggccagggcacactggttacagtttctgctggtggcggaggatctggcggaggtggaagcggcggaggcggatccaatatcatgatgacacagagccccagcagcctggctgtgtctgctggcgagaaagtgaccatgtcctgcaagagcagccagagcgtgctgtactccagcaaccagaagaactacctggcctggtatcagcagaagcccggccagtctcctaagctgctgatctactgggccagcaccagagaaagcggcgtgcccgatagattcacaggcagcggcagcggaaccgacttcaccctgacaatcagctctgtgcaggccgaagatctggccgtgtactattgccaccagtacctgtccagcctgacctttggcgccggaacaaagctggaactgaag

SEQ ID NO: 1575 - protein, 247 aa, Artificial Sequence
  mu20A10 scFv full sequence
EVMLVESGGGLVKPGGSLKLSCAASGFTFSTYAMSWIRQTPEKRLEWVASIGRAGSTYYSDSVKGRFTISRDNVRNILYLQMSSLRSEDTAMYYCARGPIYNDYDEFAYWGQGTLVTVSAGGGGSGGGGSGGGGSNIMMTQSPSSLAVSAGEKVTMSCKSSQSVLYSSNQKNYLAWYQQKPGQSPKLLIYWASTRESGVPDRFTGSGSGTDFTLTISSVQAEDLAVYYCHQYLSSLTFGAGTKLELK

SEQ ID NO: 1576 - DNA, 741 bp, Artificial Sequence
  hu20A10M scFV
gaggtgcagctggttgaatctggcggcggacttgtgaagcctggcggatctctgagactgagctgtgccgccagcggcttcacctttagcacatacgccatgagctgggtccgacaggcccctggaaaaggccttgaatgggttgcctctatcggcagagccggcagcacctactacagcgattctgtgaagggcagattcaccatcagccgggacaacgccaagaacagcctgtacctgcagatgaactccctgagagccgaggacaccgccgtgtactattgtgccagaggacccatctacaacgactacgacgagttcgcctattggggccagggcacactggtcacagtcagctctggcggtggcggaagcggaggcggtggctccggtggcggaggcagcgacatcgtgatgacacagagcccttctagcctggccgtgtctctgggagagagagccacaatcagctgcaagagcagccagagcgtgctgtactccagcaaccagaagaactacctggcctggtatcagcagaagcccggacagtctcccaagctgctgatctactgggccagcaccagagaaagcggcgtgcccgatagattcacaggctctggcagcggcaccgacttcaccctgacaattagcagtctgcaggccgaggacgtggccgtgtactactgtcaccagtacctgagcagcctgacctttggcggcggaacaaaggtggaaatcaag

SEQ ID NO: 1577 - protein, 247 aa, Artificial Sequence
  hu20A10M scFV
EVQLVESGGGLVKPGGSLRLSCAASGFTFSTYAMSWVRQAPGKGLEWVASIGRAGSTYYSDSVKGRFTISRDNAKNSLYLQMNSLRAEDTAVYYCARGPIYNDYDEFAYWGQGTLVTVSSGGGGSGGGGSGGGGSDIVMTQSPSSLAVSLGERATISCKSSQSVLYSSNQKNYLAWYQQKPGQSPKLLIYWASTRESGVPDRFTGSGSGTDFTLTISSLQAEDVAVYYCHQYLSSLTFGGGTKVEIK

SEQ ID NO: 1578 - DNA, 744 bp, Artificial Sequence
  hu20A10C2 scFV
gaggtgcagctggttgaatctggcggcggacttgtgaagcctggcggatctctgagactgagctgtgccgccagcggcttcacctttagcacatacgccatgagctgggtccgacaggcccctggaaaaggccttgaatgggttgcctctatcggcagagccggcagcacctactacagcgattctgtgaagggcagattcaccatcagccgggacaacgccaagaacagcctgtacctgcagatgaactccctgagagccgaggacaccgccgtgtactattgtgccagaggacccatctacaacgactacgacgagttcgcctattggggccagggcacactggtcacagtcagctctggcggtggcggaagcggaggcggtggctccggtggcggaggcagcgacattgtgctgacccagtctccagcctccttggccgtgtctccaggacagagggccaccatcacctgcaagagcagccagagcgtgctgtactccagcaaccagaagaactacctggcctggtatcagcagaaaccaggacaacctcctaaactcctgatttactgggccagcaccagagaaagcggggtcccagccaggttcagcggcagtgggtctgggaccgatttcaccctcacaattaatcctgtggaagctaatgatactgcaaattattactgtcaccagtacctgagcagcctgaccttcggcggagggaccaaggtggagatcaaacga

SEQ ID NO: 1579 - protein, 248 aa, Artificial Sequence
  hu20A10C2 scFV
EVQLVESGGGLVKPGGSLRLSCAASGFTFSTYAMSWVRQAPGKGLEWVASIGRAGSTYYSDSVKGRFTISRDNAKNSLYLQMNSLRAEDTAVYYCARGPIYNDYDEFAYWGQGTLVTVSSGGGGSGGGGSGGGGSDIVLTQSPASLAVSPGQRATITCKSSQSVLYSSNQKNYLAWYQQKPGQPPKLLIYWASTRESGVPARFSGSGSGTDFTLTINPVEANDTANYYCHQYLSSLTFGGGTKVEIKR

SEQ ID NO: 1580 - DNA, 744 bp, Artificial Sequence
  hu20A10N scFV
caggtgcagctggttgaatctggcggcggacttgtgaagcctggcggatctctgagactgagctgtgccgccagcggcttcacctttagcacatacgccatgagctggatcagacaggcccctggcaaaggcctggaatgggtggcgtctattggcagagccggcagcacctactacagcgactctgtgaagggcagattcaccatcagccgggacaacgccaagaacagcctgtacctgcagatgaactccctgagagccgaggacaccgccgtgtactattgtgccagaggacccatctacaacgactacgacgagttcgcctattggggccagggcacactggtcacagtttctagcggcggtggcggaagcggaggcggtggctccggtggcggaggcagcgaaattgtgctgacacagagccccgccacactgtcactttctccaggcgaaagagccacactgagctgcaagagcagccagagcgtgctgtactccagcaaccagaagaactacctggcctggtatcagcagaagcccggccaagctcctcggctgctgatctattgggccagcacaagagagagcggcatccctgccagattttctggcagcggctctggcaccgatttcaccctgaccataagcagcctggaacctgaggacttcgccgtgtattactgccaccagtacctgagcagcctgacctttggcggaggcaccaaggtggaaatcaagcgg

SEQ ID NO: 1581 - protein, 248 aa, Artificial Sequence
  hu20A10N scFV
QVQLVESGGGLVKPGGSLRLSCAASGFTFSTYAMSWIRQAPGKGLEWVASIGRAGSTYYSDSVKGRFTISRDNAKNSLYLQMNSLRAEDTAVYYCARGPIYNDYDEFAYWGQGTLVTVSSGGGGSGGGGSGGGGSEIVLTQSPATLSLSPGERATLSCKSSQSVLYSSNQKNYLAWYQQKPGQAPRLLIYWASTRESGIPARFSGSGSGTDFTLTISSLEPEDFAVYYCHQYLSSLTFGGGTKVEIKR

SEQ ID NO: 1582 - DNA, 1479 bp, Artificial Sequence
  mu20A10CAR T841BB3z
atggccttaccagtgaccgccttgctcctgccgctggccttgctgctccacgccgccaggccggaagtgatgctggtggaatctggcggcggactggttaagcctggcggatctctgaagctgagctgtgccgccagcggcttcacctttagcacatacgccatgagctggatccggcagacccctgagaagagactggaatgggttgccagcatcggcagagccggcagcacctactacagcgattctgtgaagggcagattcaccatcagccgggacaacgtgcggaacatcctgtacctgcagatgagcagcctgcggagcgaggataccgccatgtactactgtgccagaggacccatctacaacgactacgacgagttcgcctattggggccagggcacactggttacagtttctgctggtggcggaggatctggcggaggtggaagcggcggaggcggatccaatatcatgatgacacagagcccgagcagcctggctgtgtctgctggcgagaaagtgaccatgtcctgcaagagcagccagagcgtgctgtactccagcaaccagaagaactacctggcctggtatcagcagaagcccggccagtctcctaagctgctgatctactgggccagcaccagagaaagcggcgtgcccgatagattcacaggcagcggcagcggaaccgacttcaccctgacaatcagctctgtgcaggccgaagatctggccgtgtactattgccaccagtacctgtccagcctgacctttggcgccggaacaaagctggaactgaagacaacaacccctgcccccagacctcctaccccagcccctacaattgccagccagcctctgagcctgaggcccgaggcttgtagacctgctgctggcggagccgtgcacaccagaggactggatttcgcctgcgacatctacatctgggcgcccttggccgggacttgtggggtccttctcctgtcactggttatcaccctttactgcaaacggggcagaaagaaactcctgtatatattcaaacaaccatttatgagaccagtacaaactactcaagaggaagatggctgtagctgccgatttccagaagaagaagaaggaggatgtgaactgagagtgaagttcagcaggagcgcagacgcccccgcgtacaagcagggccagaaccagctctataacgagctcaatctaggacgaagagaggagtacgatgttttggacaagagacgtggccgggaccctgagatggggggaaagccgagaaggaagaaccctcaggaaggcctgtacaatgaactgcagaaagataagatggcggaggcctacagtgagattgggatgaaaggcgagcgccggaggggcaaggggcacgatggcctttaccagggtctcagtacagccaccaaggacacctacgacgcccttcacatgcaggccctgccccctcgctgataa

SEQ ID NO: 1583 - protein, 491 aa, Artificial Sequence
  mu20A10CAR T841BB3z
MALPVTALLLPLALLLHAARPEVMLVESGGGLVKPGGSLKLSCAASGFTFSTYAMSWIRQTPEKRLEWVASIGRAGSTYYSDSVKGRFTISRDNVRNILYLQMSSLRSEDTAMYYCARGPIYNDYDEFAYWGQGTLVTVSAGGGGSGGGGSGGGGSNIMMTQSPSSLAVSAGEKVTMSCKSSQSVLYSSNQKNYLAWYQQKPGQSPKLLIYWASTRESGVPDRFTGSGSGTDFTLTISSVQAEDLAVYYCHQYLSSLTFGAGTKLELKTTTPAPRPPTPAPTIASQPLSLRPEACRPAAGGAVHTRGLDFACDIYIWAPLAGTCGVLLLSLVITLYCKRGRKKLLYIFKQPFMRPVQTTQEEDGCSCRFPEEEEGGCELRVKFSRSADAPAYKQGQNQLYNELNLGRREEYDVLDKRRGRDPEMGGKPRRKNPQEGLYNELQKDKMAEAYSEIGMKGERRRGKGHDGLYQGLSTATKDTYDALHMQALPPR

SEQ ID NO: 1584 - DNA, 1482 bp, Artificial Sequence
  hu20A10CAR T841BB3z
atggccttaccagtgaccgccttgctcctgccgctggccttgctgctccacgccgccaggccggaggtgcagctggttgaatctggcggcggacttgtgaagcctggcggatctctgagactgagctgtgccgccagcggcttcacctttagcacatacgccatgagctgggtccgacaggcccctggaaaaggccttgaatgggttgcctctatcggcagagccggcagcacctactacagcgattctgtgaagggcagattcaccatcagccgggacaacgccaagaacagcctgtacctgcagatgaactccctgagagccgaggacaccgccgtgtactattgtgccagaggacccatctacaacgactacgacgagttcgcctattggggccagggcacactggtcacagtcagctctggcggtggcggaagcggaggcggtggctccggtggcggaggcagcgacattgtgctgacccagtctccagcctccttggccgtgtctccaggacagagggccaccatcacctgcaagagcagccagagcgtgctgtactccagcaaccagaagaactacctggcctggtatcagcagaaaccaggacaacctcctaaactcctgatttactgggccagcaccagagaaagcggggtcccagccaggttcagcggcagtgggtctgggaccgatttcaccctcacaattaatcctgtggaagctaatgatactgcaaattattactgtcaccagtacctgagcagcctgaccttcggcggagggaccaaggtggagatcaaacgaacaacaacccctgcccccagacctcctaccccagcccctacaattgccagccagcctctgagcctgaggcccgaggcttgtagacctgctgctggcggagccgtgcacaccagaggactggatttcgcctgcgacatctacatctgggcgcccttggccgggacttgtggggtccttctcctgtcactggttatcaccctttactgcaaacggggcagaaagaaactcctgtatatattcaaacaaccatttatgagaccagtacaaactactcaagaggaagatggctgtagctgccgatttccagaagaagaagaaggaggatgtgaactgagagtgaagttcagcaggagcgcagacgcccccgcgtacaagcagggccagaaccagctctataacgagctcaatctaggacgaagagaggagtacgatgttttggacaagagacgtggccgggaccctgagatggggggaaagccgagaaggaagaaccctcaggaaggcctgtacaatgaactgcagaaagataagatggcggaggcctacagtgagattgggatgaaaggcgagcgccggaggggcaaggggcacgatggcctttaccagggtctcagtacagccaccaaggacacctacgacgcccttcacatgcaggccctgccccctcgctgataa

SEQ ID NO: 1585 - protein, 492 aa, Artificial Sequence
  hu20A10CAR T841BB3z
MALPVTALLLPLALLLHAARPEVQLVESGGGLVKPGGSLRLSCAASGFTFSTYAMSWVRQAPGKGLEWVASIGRAGSTYYSDSVKGRFTISRDNAKNSLYLQMNSLRAEDTAVYYCARGPIYNDYDEFAYWGQGTLVTVSSGGGGSGGGGSGGGGSDIVLTQSPASLAVSPGQRATITCKSSQSVLYSSNQKNYLAWYQQKPGQPPKLLIYWASTRESGVPARFSGSGSGTDFTLTINPVEANDTANYYCHQYLSSLTFGGGTKVEIKRTTTPAPRPPTPAPTIASQPLSLRPEACRPAAGGAVHTRGLDFACDIYIWAPLAGTCGVLLLSLVITLYCKRGRKKLLYIFKQPFMRPVQTTQEEDGCSCRFPEEEEGGCELRVKFSRSADAPAYKQGQNQLYNELNLGRREEYDVLDKRRGRDPEMGGKPRRKNPQEGLYNELQKDKMAEAYSEIGMKGERRRGKGHDGLYQGLSTATKDTYDALHMQALPPR

SEQ ID NO: 1586 - DNA, 1476 bp, Artificial Sequence
  mu20A10CAR T8283z
atggccttaccagtgaccgccttgctcctgccgctggccttgctgctccacgccgccaggccggaagtgatgctggtggaatctggcggcggactggttaagcctggcggatctctgaagctgagctgtgccgccagcggcttcacctttagcacatacgccatgagctggatccggcagacccctgagaagagactggaatgggttgccagcatcggcagagccggcagcacctactacagcgattctgtgaagggcagattcaccatcagccgggacaacgtgcggaacatcctgtacctgcagatgagcagcctgcggagcgaggataccgccatgtactactgtgccagaggacccatctacaacgactacgacgagttcgcctattggggccagggcacactggttacagtttctgctggtggcggaggatctggcggaggtggaagcggcggaggcggatccaatatcatgatgacacagagcccgagcagcctggctgtgtctgctggcgagaaagtgaccatgtcctgcaagagcagccagagcgtgctgtactccagcaaccagaagaactacctggcctggtatcagcagaagcccggccagtctcctaagctgctgatctactgggccagcaccagagaaagcggcgtgcccgatagattcacaggcagcggcagcggaaccgacttcaccctgacaatcagctctgtgcaggccgaagatctggccgtgtactattgccaccagtacctgtccagcctgacctttggcgccggaacaaagctggaactgaagacaacaacccctgcccccagacctcctaccccagcccctacaattgccagccagcctctgagcctgaggcccgaggcttgtagacctgctgctggcggagccgtgcacaccagaggactggatttcgcctgcgacatctacatctgggcgcccttggccgggacttgtggggtccttctcctgtcactggttatcaccctttactgcaggagtaagaggagcaggctcctgcacagtgactacatgaacatgactcctagaagacctgggcctaccagaaagcattaccagccctatgccccaccacgcgacttcgcagcctatcgctccagagtgaagttcagcaggagcgcagacgcccccgcgtacaagcagggccagaaccagctctataacgagctcaatctaggacgaagagaggagtacgatgttttggacaagagacgtggccgggaccctgagatggggggaaagccgagaaggaagaaccctcaggaaggcctgtacaatgaactgcagaaagataagatggcggaggcctacagtgagattgggatgaaaggcgagcgccggaggggcaaggggcacgatggcctttaccagggtctcagtacagccaccaaggacacctacgacgcccttcacatgcaggccctgccccctcgctgataa

SEQ ID NO: 1587 - protein, 490 aa, Artificial Sequence
  mu20A10CAR T8283z
MALPVTALLLPLALLLHAARPEVMLVESGGGLVKPGGSLKLSCAASGFTFSTYAMSWIRQTPEKRLEWVASIGRAGSTYYSDSVKGRFTISRDNVRNILYLQMSSLRSEDTAMYYCARGPIYNDYDEFAYWGQGTLVTVSAGGGGSGGGGSGGGGSNIMMTQSPSSLAVSAGEKVTMSCKSSQSVLYSSNQKNYLAWYQQKPGQSPKLLIYWASTRESGVPDRFTGSGSGTDFTLTISSVQAEDLAVYYCHQYLSSLTFGAGTKLELKTTTPAPRPPTPAPTIASQPLSLRPEACRPAAGGAVHTRGLDFACDIYIWAPLAGTCGVLLLSLVITLYCRSKRSRLLHSDYMNMTPRRPGPTRKHYQPYAPPRDFAAYRSRVKFSRSADAPAYKQGQNQLYNELNLGRREEYDVLDKRRGRDPEMGGKPRRKNPQEGLYNELQKDKMAEAYSEIGMKGERRRGKGHDGLYQGLSTATKDTYDALHMQALPPR

SEQ ID NO: 1588 - DNA, 1479 bp, Artificial Sequence
  hu20A10CAR T8283z
atggccttaccagtgaccgccttgctcctgccgctggccttgctgctccacgccgccaggccggaggtgcagctggttgaatctggcggcggacttgtgaagcctggcggatctctgagactgagctgtgccgccagcggcttcacctttagcacatacgccatgagctgggtccgacaggcccctggaaaaggccttgaatgggttgcctctatcggcagagccggcagcacctactacagcgattctgtgaagggcagattcaccatcagccgggacaacgccaagaacagcctgtacctgcagatgaactccctgagagccgaggacaccgccgtgtactattgtgccagaggacccatctacaacgactacgacgagttcgcctattggggccagggcacactggtcacagtcagctctggcggtggcggaagcggaggcggtggctccggtggcggaggcagcgacattgtgctgacccagtctccagcctccttggccgtgtctccaggacagagggccaccatcacctgcaagagcagccagagcgtgctgtactccagcaaccagaagaactacctggcctggtatcagcagaaaccaggacaacctcctaaactcctgatttactgggccagcaccagagaaagcggggtcccagccaggttcagcggcagtgggtctgggaccgatttcaccctcacaattaatcctgtggaagctaatgatactgcaaattattactgtcaccagtacctgagcagcctgaccttcggcggagggaccaaggtggagatcaaacgaacaacaacccctgcccccagacctcctaccccagcccctacaattgccagccagcctctgagcctgaggcccgaggcttgtagacctgctgctggcggagccgtgcacaccagaggactggatttcgcctgcgacatctacatctgggcgcccttggccgggacttgtggggtccttctcctgtcactggttatcaccctttactgcaggagtaagaggagcaggctcctgcacagtgactacatgaacatgactcctagaagacctgggcctaccagaaagcattaccagccctatgccccaccacgcgacttcgcagcctatcgctccagagtgaagttcagcaggagcgcagacgcccccgcgtacaagcagggccagaaccagctctataacgagctcaatctaggacgaagagaggagtacgatgttttggacaagagacgtggccgggaccctgagatggggggaaagccgagaaggaagaaccctcaggaaggcctgtacaatgaactgcagaaagataagatggcggaggcctacagtgagattgggatgaaaggcgagcgccggaggggcaaggggcacgatggcctttaccagggtctcagtacagccaccaaggacacctacgacgcccttcacatgcaggccctgccccctcgctgataa

SEQ ID NO: 1589 - protein, 491 aa, Artificial Sequence
  hu20A10CAR T8283z
MALPVTALLLPLALLLHAARPEVQLVESGGGLVKPGGSLRLSCAASGFTFSTYAMSWVRQAPGKGLEWVASIGRAGSTYYSDSVKGRFTISRDNAKNSLYLQMNSLRAEDTAVYYCARGPIYNDYDEFAYWGQGTLVTVSSGGGGSGGGGSGGGGSDIVLTQSPASLAVSPGQRATITCKSSQSVLYSSNQKNYLAWYQQKPGQPPKLLIYWASTRESGVPARFSGSGSGTDFTLTINPVEANDTANYYCHQYLSSLTFGGGTKVEIKRTTTPAPRPPTPAPTIASQPLSLRPEACRPAAGGAVHTRGLDFACDIYIWAPLAGTCGVLLLSLVITLYCRSKRSRLLHSDYMNMTPRRPGPTRKHYQPYAPPRDFAAYRSRVKFSRSADAPAYKQGQNQLYNELNLGRREEYDVLDKRRGRDPEMGGKPRRKNPQEGLYNELQKDKMAEAYSEIGMKGERRRGKGHDGLYQGLSTATKDTYDALHMQALPPR

SEQ ID NO: 1590 - DNA, 1479 bp, Artificial Sequence
  mu20A10CAR T841BB3z1XX
atggccttaccagtgaccgccttgctcctgccgctggccttgctgctccacgccgccaggccggaagtgatgctggtggaatctggcggcggactggttaagcctggcggatctctgaagctgagctgtgccgccagcggcttcacctttagcacatacgccatgagctggatccggcagacccctgagaagagactggaatgggttgccagcatcggcagagccggcagcacctactacagcgattctgtgaagggcagattcaccatcagccgggacaacgtgcggaacatcctgtacctgcagatgagcagcctgcggagcgaggataccgccatgtactactgtgccagaggacccatctacaacgactacgacgagttcgcctattggggccagggcacactggttacagtttctgctggtggcggaggatctggcggaggtggaagcggcggaggcggatccaatatcatgatgacacagagcccgagcagcctggctgtgtctgctggcgagaaagtgaccatgtcctgcaagagcagccagagcgtgctgtactccagcaaccagaagaactacctggcctggtatcagcagaagcccggccagtctcctaagctgctgatctactgggccagcaccagagaaagcggcgtgcccgatagattcacaggcagcggcagcggaaccgacttcaccctgacaatcagctctgtgcaggccgaagatctggccgtgtactattgccaccagtacctgtccagcctgacctttggcgccggaacaaagctggaactgaagacaacaacccctgcccccagacctcctaccccagcccctacaattgccagccagcctctgagcctgaggcccgaggcttgtagacctgctgctggcggagccgtgcacaccagaggactggatttcgcctgcgacatctacatctgggcgcccttggccgggacttgtggggtccttctcctgtcactggttatcaccctttactgcaaacggggcagaaagaaactcctgtatatattcaaacaaccatttatgagaccagtacaaactactcaagaggaagatggctgtagctgccgatttccagaagaagaagaaggaggatgtgaactgagagtgaagttcagcaggagcgcagacgcccccgcgtacaagcagggccagaaccagctctataacgagctcaatctaggacgaagagaggagtacgatgttttggacaagagacgtggccgggaccctgagatggggggaaagccgagaaggaagaaccctcaggaaggcctgttcaatgaactgcagaaagataagatggcggaggccttcagtgagattgggatgaaaggcgagcgccggaggggcaaggggcacgatggccttttccagggtctcagtacagccaccaaggacaccttcgacgcccttcacatgcaggccctgccccctcgctgataa

SEQ ID NO: 1591 - protein, 491 aa, Artificial Sequence
  mu20A10CAR T841BB3z1XX
MALPVTALLLPLALLLHAARPEVMLVESGGGLVKPGGSLKLSCAASGFTFSTYAMSWIRQTPEKRLEWVASIGRAGSTYYSDSVKGRFTISRDNVRNILYLQMSSLRSEDTAMYYCARGPIYNDYDEFAYWGQGTLVTVSAGGGGSGGGGSGGGGSNIMMTQSPSSLAVSAGEKVTMSCKSSQSVLYSSNQKNYLAWYQQKPGQSPKLLIYWASTRESGVPDRFTGSGSGTDFTLTISSVQAEDLAVYYCHQYLSSLTFGAGTKLELKTTTPAPRPPTPAPTIASQPLSLRPEACRPAAGGAVHTRGLDFACDIYIWAPLAGTCGVLLLSLVITLYCKRGRKKLLYIFKQPFMRPVQTTQEEDGCSCRFPEEEEGGCELRVKFSRSADAPAYKQGQNQLYNELNLGRREEYDVLDKRRGRDPEMGGKPRRKNPQEGLFNELQKDKMAEAFSEIGMKGERRRGKGHDGLFQGLSTATKDTFDALHMQALPPR

SEQ ID NO: 1592 - DNA, 1482 bp, Artificial Sequence
  hu20A10CAR T841BB3z1XX
atggccttaccagtgaccgccttgctcctgccgctggccttgctgctccacgccgccaggccggaggtgcagctggttgaatctggcggcggacttgtgaagcctggcggatctctgagactgagctgtgccgccagcggcttcacctttagcacatacgccatgagctgggtccgacaggcccctggaaaaggccttgaatgggttgcctctatcggcagagccggcagcacctactacagcgattctgtgaagggcagattcaccatcagccgggacaacgccaagaacagcctgtacctgcagatgaactccctgagagccgaggacaccgccgtgtactattgtgccagaggacccatctacaacgactacgacgagttcgcctattggggccagggcacactggtcacagtcagctctggcggtggcggaagcggaggcggtggctccggtggcggaggcagcgacattgtgctgacccagtctccagcctccttggccgtgtctccaggacagagggccaccatcacctgcaagagcagccagagcgtgctgtactccagcaaccagaagaactacctggcctggtatcagcagaaaccaggacaacctcctaaactcctgatttactgggccagcaccagagaaagcggggtcccagccaggttcagcggcagtgggtctgggaccgatttcaccctcacaattaatcctgtggaagctaatgatactgcaaattattactgtcaccagtacctgagcagcctgaccttcggcggagggaccaaggtggagatcaaacgaacaacaacccctgcccccagacctcctaccccagcccctacaattgccagccagcctctgagcctgaggcccgaggcttgtagacctgctgctggcggagccgtgcacaccagaggactggatttcgcctgcgacatctacatctgggcgcccttggccgggacttgtggggtccttctcctgtcactggttatcaccctttactgcaaacggggcagaaagaaactcctgtatatattcaaacaaccatttatgagaccagtacaaactactcaagaggaagatggctgtagctgccgatttccagaagaagaagaaggaggatgtgaactgagagtgaagttcagcaggagcgcagacgcccccgcgtacaagcagggccagaaccagctctataacgagctcaatctaggacgaagagaggagtacgatgttttggacaagagacgtggccgggaccctgagatggggggaaagccgagaaggaagaaccctcaggaaggcctgttcaatgaactgcagaaagataagatggcggaggccttcagtgagattgggatgaaaggcgagcgccggaggggcaaggggcacgatggccttttccagggtctcagtacagccaccaaggacaccttcgacgcccttcacatgcaggccctgccccctcgctgataa

SEQ ID NO: 1593 - protein, 492 aa, Artificial Sequence
  hu20A10CAR T841BB3z1XX
MALPVTALLLPLALLLHAARPEVQLVESGGGLVKPGGSLRLSCAASGFTFSTYAMSWVRQAPGKGLEWVASIGRAGSTYYSDSVKGRFTISRDNAKNSLYLQMNSLRAEDTAVYYCARGPIYNDYDEFAYWGQGTLVTVSSGGGGSGGGGSGGGGSDIVLTQSPASLAVSPGQRATITCKSSQSVLYSSNQKNYLAWYQQKPGQPPKLLIYWASTRESGVPARFSGSGSGTDFTLTINPVEANDTANYYCHQYLSSLTFGGGTKVEIKRTTTPAPRPPTPAPTIASQPLSLRPEACRPAAGGAVHTRGLDFACDIYIWAPLAGTCGVLLLSLVITLYCKRGRKKLLYIFKQPFMRPVQTTQEEDGCSCRFPEEEEGGCELRVKFSRSADAPAYKQGQNQLYNELNLGRREEYDVLDKRRGRDPEMGGKPRRKNPQEGLFNELQKDKMAEAFSEIGMKGERRRGKGHDGLFQGLSTATKDTFDALHMQALPPR

SEQ ID NO: 1594 - DNA, 1476 bp, Artificial Sequence
  mu20A10CAR T8283z1XX
atggccttaccagtgaccgccttgctcctgccgctggccttgctgctccacgccgccaggccggaagtgatgctggtggaatctggcggcggactggttaagcctggcggatctctgaagctgagctgtgccgccagcggcttcacctttagcacatacgccatgagctggatccggcagacccctgagaagagactggaatgggttgccagcatcggcagagccggcagcacctactacagcgattctgtgaagggcagattcaccatcagccgggacaacgtgcggaacatcctgtacctgcagatgagcagcctgcggagcgaggataccgccatgtactactgtgccagaggacccatctacaacgactacgacgagttcgcctattggggccagggcacactggttacagtttctgctggtggcggaggatctggcggaggtggaagcggcggaggcggatccaatatcatgatgacacagagcccgagcagcctggctgtgtctgctggcgagaaagtgaccatgtcctgcaagagcagccagagcgtgctgtactccagcaaccagaagaactacctggcctggtatcagcagaagcccggccagtctcctaagctgctgatctactgggccagcaccagagaaagcggcgtgcccgatagattcacaggcagcggcagcggaaccgacttcaccctgacaatcagctctgtgcaggccgaagatctggccgtgtactattgccaccagtacctgtccagcctgacctttggcgccggaacaaagctggaactgaagacaacaacccctgcccccagacctcctaccccagcccctacaattgccagccagcctctgagcctgaggcccgaggcttgtagacctgctgctggcggagccgtgcacaccagaggactggatttcgcctgcgacatctacatctgggcgcccttggccgggacttgtggggtccttctcctgtcactggttatcaccctttactgcaggagtaagaggagcaggctcctgcacagtgactacatgaacatgactcctagaagacctgggcctaccagaaagcattaccagccctatgccccaccacgcgacttcgcagcctatcgctccagagtgaagttcagcaggagcgcagacgcccccgcgtacaagcagggccagaaccagctctataacgagctcaatctaggacgaagagaggagtacgatgttttggacaagagacgtggccgggaccctgagatggggggaaagccgagaaggaagaaccctcaggaaggcctgttcaatgaactgcagaaagataagatggcggaggccttcagtgagattgggatgaaaggcgagcgccggaggggcaaggggcacgatggccttttccagggtctcagtacagccaccaaggacaccttcgacgcccttcacatgcaggccctgccccctcgctgataa

SEQ ID NO: 1595 - protein, 490 aa, Artificial Sequence
  mu20A10CAR T8283z1XX
MALPVTALLLPLALLLHAARPEVMLVESGGGLVKPGGSLKLSCAASGFTFSTYAMSWIRQTPEKRLEWVASIGRAGSTYYSDSVKGRFTISRDNVRNILYLQMSSLRSEDTAMYYCARGPIYNDYDEFAYWGQGTLVTVSAGGGGSGGGGSGGGGSNIMMTQSPSSLAVSAGEKVTMSCKSSQSVLYSSNQKNYLAWYQQKPGQSPKLLIYWASTRESGVPDRFTGSGSGTDFTLTISSVQAEDLAVYYCHQYLSSLTFGAGTKLELKTTTPAPRPPTPAPTIASQPLSLRPEACRPAAGGAVHTRGLDFACDIYIWAPLAGTCGVLLLSLVITLYCRSKRSRLLHSDYMNMTPRRPGPTRKHYQPYAPPRDFAAYRSRVKFSRSADAPAYKQGQNQLYNELNLGRREEYDVLDKRRGRDPEMGGKPRRKNPQEGLFNELQKDKMAEAFSEIGMKGERRRGKGHDGLFQGLSTATKDTFDALHMQALPPR

SEQ ID NO: 1596 - DNA, 1479 bp, Artificial Sequence
  hu20A10CAR T8283z1XX
atggccttaccagtgaccgccttgctcctgccgctggccttgctgctccacgccgccaggccggaggtgcagctggttgaatctggcggcggacttgtgaagcctggcggatctctgagactgagctgtgccgccagcggcttcacctttagcacatacgccatgagctgggtccgacaggcccctggaaaaggccttgaatgggttgcctctatcggcagagccggcagcacctactacagcgattctgtgaagggcagattcaccatcagccgggacaacgccaagaacagcctgtacctgcagatgaactccctgagagccgaggacaccgccgtgtactattgtgccagaggacccatctacaacgactacgacgagttcgcctattggggccagggcacactggtcacagtcagctctggcggtggcggaagcggaggcggtggctccggtggcggaggcagcgacattgtgctgacccagtctccagcctccttggccgtgtctccaggacagagggccaccatcacctgcaagagcagccagagcgtgctgtactccagcaaccagaagaactacctggcctggtatcagcagaaaccaggacaacctcctaaactcctgatttactgggccagcaccagagaaagcggggtcccagccaggttcagcggcagtgggtctgggaccgatttcaccctcacaattaatcctgtggaagctaatgatactgcaaattattactgtcaccagtacctgagcagcctgaccttcggcggagggaccaaggtggagatcaaacgaacaacaacccctgcccccagacctcctaccccagcccctacaattgccagccagcctctgagcctgaggcccgaggcttgtagacctgctgctggcggagccgtgcacaccagaggactggatttcgcctgcgacatctacatctgggcgcccttggccgggacttgtggggtccttctcctgtcactggttatcaccctttactgcaggagtaagaggagcaggctcctgcacagtgactacatgaacatgactcctagaagacctgggcctaccagaaagcattaccagccctatgccccaccacgcgacttcgcagcctatcgctccagagtgaagttcagcaggagcgcagacgcccccgcgtacaagcagggccagaaccagctctataacgagctcaatctaggacgaagagaggagtacgatgttttggacaagagacgtggccgggaccctgagatggggggaaagccgagaaggaagaaccctcaggaaggcctgttcaatgaactgcagaaagataagatggcggaggccttcagtgagattgggatgaaaggcgagcgccggaggggcaaggggcacgatggccttttccagggtctcagtacagccaccaaggacaccttcgacgcccttcacatgcaggccctgccccctcgctgataa

SEQ ID NO: 1597 - protein, 491 aa, Artificial Sequence
  hu20A10CAR T8283z1XX
MALPVTALLLPLALLLHAARPEVQLVESGGGLVKPGGSLRLSCAASGFTFSTYAMSWVRQAPGKGLEWVASIGRAGSTYYSDSVKGRFTISRDNAKNSLYLQMNSLRAEDTAVYYCARGPIYNDYDEFAYWGQGTLVTVSSGGGGSGGGGSGGGGSDIVLTQSPASLAVSPGQRATITCKSSQSVLYSSNQKNYLAWYQQKPGQPPKLLIYWASTRESGVPARFSGSGSGTDFTLTINPVEANDTANYYCHQYLSSLTFGGGTKVEIKRTTTPAPRPPTPAPTIASQPLSLRPEACRPAAGGAVHTRGLDFACDIYIWAPLAGTCGVLLLSLVITLYCRSKRSRLLHSDYMNMTPRRPGPTRKHYQPYAPPRDFAAYRSRVKFSRSADAPAYKQGQNQLYNELNLGRREEYDVLDKRRGRDPEMGGKPRRKNPQEGLFNELQKDKMAEAFSEIGMKGERRRGKGHDGLFQGLSTATKDTFDALHMQALPPR

SEQ ID NO: 1598 - DNA, 738 bp, Artificial Sequence
  mu25E6 scFv full sequence
gaggtgcagctggtggagtctgggggagacttagtgaagcctggagggtccctgaaactctcctgtgcagcctctggtttcactttcagtagttatggaatgtcttgggttcgccagactccagacaagaggctggagtgggtcgcaaccattagtaatggtggtagacacaccttctatccagacagtgtgaaggggcgattcaccatctccagagacaatgccaagaacaccctgtatctgcaaatgagcagtctgaagtctgaggacacagccatgtatttatgtgtaagacagactgggacggagggctggtttgcttactggggccaagggactctggtcactgtctctgcaggtggcggaggatctggcggaggtggaagcggcggaggcggatccgatgttgtgatgacccagactccactcactttgtcggttaccattggacaaccagcctccatctcttgcaagtcaagtcagagcctcttagatagtgatggaaagacatatttgaattggttgttacagaggccaggccagtctccaaagcgcctaatctatctggtgtctaaactggactctggagtccctgacaggttcactggcagtggatcagggacagatttcacactgaaaatcagcagagtggaggctgaggatttgggagtttattattgctggcaaggtacacattttcctcagacgttcggtggaggcaccaagctggaaatcaaa

SEQ ID NO: 1599 - protein, 246 aa, Artificial Sequence
  mu25E6 scFv full sequence
EVQLVESGGDLVKPGGSLKLSCAASGFTFSSYGMSWVRQTPDKRLEWVATISNGGRHTFYPDSVKGRFTISRDNAKNTLYLQMSSLKSEDTAMYLCVRQTGTEGWFAYWGQGTLVTVSAGGGGSGGGGSGGGGSDVVMTQTPLTLSVTIGQPASISCKSSQSLLDSDGKTYLNWLLQRPGQSPKRLIYLVSKLDSGVPDRFTGSGSGTDFTLKISRVEAEDLGVYYCWQGTHFPQTFGGGTKLEIK

SEQ ID NO: 1600 - DNA, 738 bp, Artificial Sequence
  hu25E6 full sequence
gaggtgcagctggtggaatctggcggaggactggtcaagcctggaggcagcctgagactgagctgcgccgccagcggcttcacattcagcagctacggcatgagctgggtgcggcaggcccctggcaagggcctggaatgggtcagcaccatcagcaacggcggaagacacaccttctaccccgacagcgtgaagggcagattcaccatctcaagagataacgccaagaacagcctgtacctgcagatgaacagcctgcgggccgaggacaccgccgtgtactactgcgccagacagaccggcacagagggctggttcgcctactggggccagggcaccctggtgaccgtgtccagcggcggtggcggaagcggaggcggtggctccggtggcggaggcagcgacatcgtgatgacccagacccctctgtctctgagcgtgacccctggccagcctgccagcatctcttgtaaaagcagccagagcctgctggacagcgacggcaagacctacctgaactggtacctgcagaagcccggccaaagccctcagctgctgatctacctggtgtccaagctggatagcggtgttcctgatagattcagcggatctggcagcggcaccgacttcaccctgaagatcagcagagtggaagccgaggacgtgggcgtgtactactgctggcagggcacacacttcccccagacattcggccagggcaccaaggtggaaatcaag

SEQ ID NO: 1601 - protein, 246 aa, Artificial Sequence
  hu25E6 full sequence
EVQLVESGGGLVKPGGSLRLSCAASGFTFSSYGMSWVRQAPGKGLEWVSTISNGGRHTFYPDSVKGRFTISRDNAKNSLYLQMNSLRAEDTAVYYCARQTGTEGWFAYWGQGTLVTVSSGGGGSGGGGSGGGGSDIVMTQTPLSLSVTPGQPASISCKSSQSLLDSDGKTYLNWYLQKPGQSPQLLIYLVSKLDSGVPDRFSGSGSGTDFTLKISRVEAEDVGVYYCWQGTHFPQTFGQGTKVEIK

SEQ ID NO: 1602 - DNA, 1476 bp, Artificial Sequence
  mu25E6CAR T841BB3z
atggccttaccagtgaccgccttgctcctgccgctggccttgctgctccacgccgccaggccggaggtgcagctggtggagtctgggggagacttagtgaagcctggagggtccctgaaactctcctgtgcagcctctggtttcactttcagtagttatggaatgtcttgggttcgccagactccagacaagaggctggagtgggtcgcaaccattagtaatggtggtagacacaccttctatccagacagtgtgaaggggcgattcaccatctccagagacaatgccaagaacaccctgtatctgcaaatgagcagtctgaagtctgaggacacagccatgtatttatgtgtaagacagactgggacggagggctggtttgcttactggggccaagggactctggtcactgtctctgcaggtggcggaggatctggcggaggtggaagcggcggaggcggatccgatgttgtgatgacccagactccactcactttgtcggttaccattggacaaccagcctccatctcttgcaagtcaagtcagagcctcttagatagtgatggaaagacatatttgaattggttgttacagaggccaggccagtctccaaagcgcctaatctatctggtgtctaaactggactctggagtccctgacaggttcactggcagtggatcagggacagatttcacactgaaaatcagcagagtggaggctgaggatttgggagtttattattgctggcaaggtacacattttcctcagacgttcggtggaggcaccaagctggaaatcaaaacaacaacccctgcccccagacctcctaccccagcccctacaattgccagccagcctctgagcctgaggcccgaggcttgtagacctgctgctggcggagccgtgcacaccagaggactggatttcgcctgcgacatctacatctgggcgcccttggccgggacttgtggggtccttctcctgtcactggttatcaccctttactgcaaacggggcagaaagaaactcctgtatatattcaaacaaccatttatgagaccagtacaaactactcaagaggaagatggctgtagctgccgatttccagaagaagaagaaggaggatgtgaactgagagtgaagttcagcaggagcgcagacgcccccgcgtacaagcagggccagaaccagctctataacgagctcaatctaggacgaagagaggagtacgatgttttggacaagagacgtggccgggaccctgagatggggggaaagccgagaaggaagaaccctcaggaaggcctgtacaatgaactgcagaaagataagatggcggaggcctacagtgagattgggatgaaaggcgagcgccggaggggcaaggggcacgatggcctttaccagggtctcagtacagccaccaaggacacctacgacgcccttcacatgcaggccctgccccctcgctgataa

SEQ ID NO: 1603 - protein, 490 aa, Artificial Sequence
  mu25E6CAR T841BB3z
MALPVTALLLPLALLLHAARPEVQLVESGGDLVKPGGSLKLSCAASGFTFSSYGMSWVRQTPDKRLEWVATISNGGRHTFYPDSVKGRFTISRDNAKNTLYLQMSSLKSEDTAMYLCVRQTGTEGWFAYWGQGTLVTVSAGGGGSGGGGSGGGGSDVVMTQTPLTLSVTIGQPASISCKSSQSLLDSDGKTYLNWLLQRPGQSPKRLIYLVSKLDSGVPDRFTGSGSGTDFTLKISRVEAEDLGVYYCWQGTHFPQTFGGGTKLEIKTTTPAPRPPTPAPTIASQPLSLRPEACRPAAGGAVHTRGLDFACDIYIWAPLAGTCGVLLLSLVITLYCKRGRKKLLYIFKQPFMRPVQTTQEEDGCSCRFPEEEEGGCELRVKFSRSADAPAYKQGQNQLYNELNLGRREEYDVLDKRRGRDPEMGGKPRRKNPQEGLYNELQKDKMAEAYSEIGMKGERRRGKGHDGLYQGLSTATKDTYDALHMQALPPR

SEQ ID NO: 1604 - DNA, 1476 bp, Artificial Sequence
  hu25E6CAR T841BB3z
atggccttaccagtgaccgccttgctcctgccgctggccttgctgctccacgccgccaggccggaggtgcagctggtggaatctggcggaggactggtcaagcctggaggcagcctgagactgagctgcgccgccagcggcttcacattcagcagctacggcatgagctgggtgcggcaggcccctggcaagggcctggaatgggtcagcaccatcagcaacggcggaagacacaccttctaccccgacagcgtgaagggcagattcaccatctcaagagataacgccaagaacagcctgtacctgcagatgaacagcctgcgggccgaggacaccgccgtgtactactgcgccagacagaccggcacagagggctggttcgcctactggggccagggcaccctggtgaccgtgtccagcggcggtggcggaagcggaggcggtggctccggtggcggaggcagcgacatcgtgatgacccagacccctctgtctctgagcgtgacccctggccagcctgccagcatctcttgtaaaagcagccagagcctgctggacagcgacggcaagacctacctgaactggtacctgcagaagcccggccaaagccctcagctgctgatctacctggtgtccaagctggatagcggtgttcctgatagattcagcggatctggcagcggcaccgacttcaccctgaagatcagcagagtggaagccgaggacgtgggcgtgtactactgctggcagggcacacacttcccccagacattcggccagggcaccaaggtggaaatcaagacaacaacccctgcccccagacctcctaccccagcccctacaattgccagccagcctctgagcctgaggcccgaggcttgtagacctgctgctggcggagccgtgcacaccagaggactggatttcgcctgcgacatctacatctgggcgcccttggccgggacttgtggggtccttctcctgtcactggttatcaccctttactgcaaacggggcagaaagaaactcctgtatatattcaaacaaccatttatgagaccagtacaaactactcaagaggaagatggctgtagctgccgatttccagaagaagaagaaggaggatgtgaactgagagtgaagttcagcaggagcgcagacgcccccgcgtacaagcagggccagaaccagctctataacgagctcaatctaggacgaagagaggagtacgatgttttggacaagagacgtggccgggaccctgagatggggggaaagccgagaaggaagaaccctcaggaaggcctgtacaatgaactgcagaaagataagatggcggaggcctacagtgagattgggatgaaaggcgagcgccggaggggcaaggggcacgatggcctttaccagggtctcagtacagccaccaaggacacctacgacgcccttcacatgcaggccctgccccctcgctgataa

SEQ ID NO: 1605 - protein, 490 aa, Artificial Sequence
  hu25E6CAR T841BB3z
MALPVTALLLPLALLLHAARPEVQLVESGGGLVKPGGSLRLSCAASGFTFSSYGMSWVRQAPGKGLEWVSTISNGGRHTFYPDSVKGRFTISRDNAKNSLYLQMNSLRAEDTAVYYCARQTGTEGWFAYWGQGTLVTVSSGGGGSGGGGSGGGGSDIVMTQTPLSLSVTPGQPASISCKSSQSLLDSDGKTYLNWYLQKPGQSPQLLIYLVSKLDSGVPDRFSGSGSGTDFTLKISRVEAEDVGVYYCWQGTHFPQTFGQGTKVEIKTTTPAPRPPTPAPTIASQPLSLRPEACRPAAGGAVHTRGLDFACDIYIWAPLAGTCGVLLLSLVITLYCKRGRKKLLYIFKQPFMRPVQTTQEEDGCSCRFPEEEEGGCELRVKFSRSADAPAYKQGQNQLYNELNLGRREEYDVLDKRRGRDPEMGGKPRRKNPQEGLYNELQKDKMAEAYSEIGMKGERRRGKGHDGLYQGLSTATKDTYDALHMQALPPR

SEQ ID NO: 1606 - DNA, 1473 bp, Artificial Sequence
  mu25E6CAR T8283z
atggccttaccagtgaccgccttgctcctgccgctggccttgctgctccacgccgccaggccggaggtgcagctggtggagtctgggggagacttagtgaagcctggagggtccctgaaactctcctgtgcagcctctggtttcactttcagtagttatggaatgtcttgggttcgccagactccagacaagaggctggagtgggtcgcaaccattagtaatggtggtagacacaccttctatccagacagtgtgaaggggcgattcaccatctccagagacaatgccaagaacaccctgtatctgcaaatgagcagtctgaagtctgaggacacagccatgtatttatgtgtaagacagactgggacggagggctggtttgcttactggggccaagggactctggtcactgtctctgcaggtggcggaggatctggcggaggtggaagcggcggaggcggatccgatgttgtgatgacccagactccactcactttgtcggttaccattggacaaccagcctccatctcttgcaagtcaagtcagagcctcttagatagtgatggaaagacatatttgaattggttgttacagaggccaggccagtctccaaagcgcctaatctatctggtgtctaaactggactctggagtccctgacaggttcactggcagtggatcagggacagatttcacactgaaaatcagcagagtggaggctgaggatttgggagtttattattgctggcaaggtacacattttcctcagacgttcggtggaggcaccaagctggaaatcaaaacaacaacccctgcccccagacctcctaccccagcccctacaattgccagccagcctctgagcctgaggcccgaggcttgtagacctgctgctggcggagccgtgcacaccagaggactggatttcgcctgcgacatctacatctgggcgcccttggccgggacttgtggggtccttctcctgtcactggttatcaccctttactgcaggagtaagaggagcaggctcctgcacagtgactacatgaacatgactcctagaagacctgggcctaccagaaagcattaccagccctatgccccaccacgcgacttcgcagcctatcgctccagagtgaagttcagcaggagcgcagacgcccccgcgtacaagcagggccagaaccagctctataacgagctcaatctaggacgaagagaggagtacgatgttttggacaagagacgtggccgggaccctgagatggggggaaagccgagaaggaagaaccctcaggaaggcctgtacaatgaactgcagaaagataagatggcggaggcctacagtgagattgggatgaaaggcgagcgccggaggggcaaggggcacgatggcctttaccagggtctcagtacagccaccaaggacacctacgacgcccttcacatgcaggccctgccccctcgctgataa

SEQ ID NO: 1607 - protein, 489 aa, Artificial Sequence
  mu25E6CAR T8283z
MALPVTALLLPLALLLHAARPEVQLVESGGDLVKPGGSLKLSCAASGFTFSSYGMSWVRQTPDKRLEWVATISNGGRHTFYPDSVKGRFTISRDNAKNTLYLQMSSLKSEDTAMYLCVRQTGTEGWFAYWGQGTLVTVSAGGGGSGGGGSGGGGSDVVMTQTPLTLSVTIGQPASISCKSSQSLLDSDGKTYLNWLLQRPGQSPKRLIYLVSKLDSGVPDRFTGSGSGTDFTLKISRVEAEDLGVYYCWQGTHFPQTFGGGTKLEIKTTTPAPRPPTPAPTIASQPLSLRPEACRPAAGGAVHTRGLDFACDIYIWAPLAGTCGVLLLSLVITLYCRSKRSRLLHSDYMNMTPRRPGPTRKHYQPYAPPRDFAAYRSRVKFSRSADAPAYKQGQNQLYNELNLGRREEYDVLDKRRGRDPEMGGKPRRKNPQEGLYNELQKDKMAEAYSEIGMKGERRRGKGHDGLYQGLSTATKDTYDALHMQALPPR

SEQ ID NO: 1608 - DNA, 1473 bp, Artificial Sequence
  hu25E6CAR T8283z
atggccttaccagtgaccgccttgctcctgccgctggccttgctgctccacgccgccaggccggaggtgcagctggtggaatctggcggaggactggtcaagcctggaggcagcctgagactgagctgcgccgccagcggcttcacattcagcagctacggcatgagctgggtgcggcaggcccctggcaagggcctggaatgggtcagcaccatcagcaacggcggaagacacaccttctaccccgacagcgtgaagggcagattcaccatctcaagagataacgccaagaacagcctgtacctgcagatgaacagcctgcgggccgaggacaccgccgtgtactactgcgccagacagaccggcacagagggctggttcgcctactggggccagggcaccctggtgaccgtgtccagcggcggtggcggaagcggaggcggtggctccggtggcggaggcagcgacatcgtgatgacccagacccctctgtctctgagcgtgacccctggccagcctgccagcatctcttgtaaaagcagccagagcctgctggacagcgacggcaagacctacctgaactggtacctgcagaagcccggccaaagccctcagctgctgatctacctggtgtccaagctggatagcggtgttcctgatagattcagcggatctggcagcggcaccgacttcaccctgaagatcagcagagtggaagccgaggacgtgggcgtgtactactgctggcagggcacacacttcccccagacattcggccagggcaccaaggtggaaatcaagacaacaacccctgcccccagacctcctaccccagcccctacaattgccagccagcctctgagcctgaggcccgaggcttgtagacctgctgctggcggagccgtgcacaccagaggactggatttcgcctgcgacatctacatctgggcgcccttggccgggacttgtggggtccttctcctgtcactggttatcaccctttactgcaggagtaagaggagcaggctcctgcacagtgactacatgaacatgactcctagaagacctgggcctaccagaaagcattaccagccctatgccccaccacgcgacttcgcagcctatcgctccagagtgaagttcagcaggagcgcagacgcccccgcgtacaagcagggccagaaccagctctataacgagctcaatctaggacgaagagaggagtacgatgttttggacaagagacgtggccgggaccctgagatggggggaaagccgagaaggaagaaccctcaggaaggcctgtacaatgaactgcagaaagataagatggcggaggcctacagtgagattgggatgaaaggcgagcgccggaggggcaaggggcacgatggcctttaccagggtctcagtacagccaccaaggacacctacgacgcccttcacatgcaggccctgccccctcgctgataa

SEQ ID NO: 1609 - protein, 489 aa, Artificial Sequence
  hu25E6CAR T8283z
MALPVTALLLPLALLLHAARPEVQLVESGGGLVKPGGSLRLSCAASGFTFSSYGMSWVRQAPGKGLEWVSTISNGGRHTFYPDSVKGRFTISRDNAKNSLYLQMNSLRAEDTAVYYCARQTGTEGWFAYWGQGTLVTVSSGGGGSGGGGSGGGGSDIVMTQTPLSLSVTPGQPASISCKSSQSLLDSDGKTYLNWYLQKPGQSPQLLIYLVSKLDSGVPDRFSGSGSGTDFTLKISRVEAEDVGVYYCWQGTHFPQTFGQGTKVEIKTTTPAPRPPTPAPTIASQPLSLRPEACRPAAGGAVHTRGLDFACDIYIWAPLAGTCGVLLLSLVITLYCRSKRSRLLHSDYMNMTPRRPGPTRKHYQPYAPPRDFAAYRSRVKFSRSADAPAYKQGQNQLYNELNLGRREEYDVLDKRRGRDPEMGGKPRRKNPQEGLYNELQKDKMAEAYSEIGMKGERRRGKGHDGLYQGLSTATKDTYDALHMQALPPR

SEQ ID NO: 1610 - DNA, 1476 bp, Artificial Sequence
  mu25E6CAR T841BB3z1XX
atggccttaccagtgaccgccttgctcctgccgctggccttgctgctccacgccgccaggccggaggtgcagctggtggagtctgggggagacttagtgaagcctggagggtccctgaaactctcctgtgcagcctctggtttcactttcagtagttatggaatgtcttgggttcgccagactccagacaagaggctggagtgggtcgcaaccattagtaatggtggtagacacaccttctatccagacagtgtgaaggggcgattcaccatctccagagacaatgccaagaacaccctgtatctgcaaatgagcagtctgaagtctgaggacacagccatgtatttatgtgtaagacagactgggacggagggctggtttgcttactggggccaagggactctggtcactgtctctgcaggtggcggaggatctggcggaggtggaagcggcggaggcggatccgatgttgtgatgacccagactccactcactttgtcggttaccattggacaaccagcctccatctcttgcaagtcaagtcagagcctcttagatagtgatggaaagacatatttgaattggttgttacagaggccaggccagtctccaaagcgcctaatctatctggtgtctaaactggactctggagtccctgacaggttcactggcagtggatcagggacagatttcacactgaaaatcagcagagtggaggctgaggatttgggagtttattattgctggcaaggtacacattttcctcagacgttcggtggaggcaccaagctggaaatcaaaacaacaacccctgcccccagacctcctaccccagcccctacaattgccagccagcctctgagcctgaggcccgaggcttgtagacctgctgctggcggagccgtgcacaccagaggactggatttcgcctgcgacatctacatctgggcgcccttggccgggacttgtggggtccttctcctgtcactggttatcaccctttactgcaaacggggcagaaagaaactcctgtatatattcaaacaaccatttatgagaccagtacaaactactcaagaggaagatggctgtagctgccgatttccagaagaagaagaaggaggatgtgaactgagagtgaagttcagcaggagcgcagacgcccccgcgtacaagcagggccagaaccagctctataacgagctcaatctaggacgaagagaggagtacgatgttttggacaagagacgtggccgggaccctgagatggggggaaagccgagaaggaagaaccctcaggaaggcctgttcaatgaactgcagaaagataagatggcggaggccttcagtgagattgggatgaaaggcgagcgccggaggggcaaggggcacgatggccttttccagggtctcagtacagccaccaaggacaccttcgacgcccttcacatgcaggccctgccccctcgctgataa

SEQ ID NO: 1611 - protein, 490 aa, Artificial Sequence
  mu25E6CAR T841BB3z1XX
MALPVTALLLPLALLLHAARPEVQLVESGGDLVKPGGSLKLSCAASGFTFSSYGMSWVRQTPDKRLEWVATISNGGRHTFYPDSVKGRFTISRDNAKNTLYLQMSSLKSEDTAMYLCVRQTGTEGWFAYWGQGTLVTVSAGGGGSGGGGSGGGGSDVVMTQTPLTLSVTIGQPASISCKSSQSLLDSDGKTYLNWLLQRPGQSPKRLIYLVSKLDSGVPDRFTGSGSGTDFTLKISRVEAEDLGVYYCWQGTHFPQTFGGGTKLEIKTTTPAPRPPTPAPTIASQPLSLRPEACRPAAGGAVHTRGLDFACDIYIWAPLAGTCGVLLLSLVITLYCKRGRKKLLYIFKQPFMRPVQTTQEEDGCSCRFPEEEEGGCELRVKFSRSADAPAYKQGQNQLYNELNLGRREEYDVLDKRRGRDPEMGGKPRRKNPQEGLFNELQKDKMAEAFSEIGMKGERRRGKGHDGLFQGLSTATKDTFDALHMQALPPR

SEQ ID NO: 1612 - DNA, 1476 bp, Artificial Sequence
  hu25E6CAR T841BB3z1XX
atggccttaccagtgaccgccttgctcctgccgctggccttgctgctccacgccgccaggccggaggtgcagctggtggaatctggcggaggactggtcaagcctggaggcagcctgagactgagctgcgccgccagcggcttcacattcagcagctacggcatgagctgggtgcggcaggcccctggcaagggcctggaatgggtcagcaccatcagcaacggcggaagacacaccttctaccccgacagcgtgaagggcagattcaccatctcaagagataacgccaagaacagcctgtacctgcagatgaacagcctgcgggccgaggacaccgccgtgtactactgcgccagacagaccggcacagagggctggttcgcctactggggccagggcaccctggtgaccgtgtccagcggcggtggcggaagcggaggcggtggctccggtggcggaggcagcgacatcgtgatgacccagacccctctgtctctgagcgtgacccctggccagcctgccagcatctcttgtaaaagcagccagagcctgctggacagcgacggcaagacctacctgaactggtacctgcagaagcccggccaaagccctcagctgctgatctacctggtgtccaagctggatagcggtgttcctgatagattcagcggatctggcagcggcaccgacttcaccctgaagatcagcagagtggaagccgaggacgtgggcgtgtactactgctggcagggcacacacttcccccagacattcggccagggcaccaaggtggaaatcaagacaacaacccctgcccccagacctcctaccccagcccctacaattgccagccagcctctgagcctgaggcccgaggcttgtagacctgctgctggcggagccgtgcacaccagaggactggatttcgcctgcgacatctacatctgggcgcccttggccgggacttgtggggtccttctcctgtcactggttatcaccctttactgcaaacggggcagaaagaaactcctgtatatattcaaacaaccatttatgagaccagtacaaactactcaagaggaagatggctgtagctgccgatttccagaagaagaagaaggaggatgtgaactgagagtgaagttcagcaggagcgcagacgcccccgcgtacaagcagggccagaaccagctctataacgagctcaatctaggacgaagagaggagtacgatgttttggacaagagacgtggccgggaccctgagatggggggaaagccgagaaggaagaaccctcaggaaggcctgttcaatgaactgcagaaagataagatggcggaggccttcagtgagattgggatgaaaggcgagcgccggaggggcaaggggcacgatggccttttccagggtctcagtacagccaccaaggacaccttcgacgcccttcacatgcaggccctgccccctcgctgataa

SEQ ID NO: 1613 - protein, 490 aa, Artificial Sequence
  hu25E6CAR T841BB3z1XX
MALPVTALLLPLALLLHAARPEVQLVESGGGLVKPGGSLRLSCAASGFTFSSYGMSWVRQAPGKGLEWVSTISNGGRHTFYPDSVKGRFTISRDNAKNSLYLQMNSLRAEDTAVYYCARQTGTEGWFAYWGQGTLVTVSSGGGGSGGGGSGGGGSDIVMTQTPLSLSVTPGQPASISCKSSQSLLDSDGKTYLNWYLQKPGQSPQLLIYLVSKLDSGVPDRFSGSGSGTDFTLKISRVEAEDVGVYYCWQGTHFPQTFGQGTKVEIKTTTPAPRPPTPAPTIASQPLSLRPEACRPAAGGAVHTRGLDFACDIYIWAPLAGTCGVLLLSLVITLYCKRGRKKLLYIFKQPFMRPVQTTQEEDGCSCRFPEEEEGGCELRVKFSRSADAPAYKQGQNQLYNELNLGRREEYDVLDKRRGRDPEMGGKPRRKNPQEGLFNELQKDKMAEAFSEIGMKGERRRGKGHDGLFQGLSTATKDTFDALHMQALPPR

SEQ ID NO: 1614 - DNA, 1473 bp, Artificial Sequence
  mu25E6CAR T8283z1XX
atggccttaccagtgaccgccttgctcctgccgctggccttgctgctccacgccgccaggccggaggtgcagctggtggagtctgggggagacttagtgaagcctggagggtccctgaaactctcctgtgcagcctctggtttcactttcagtagttatggaatgtcttgggttcgccagactccagacaagaggctggagtgggtcgcaaccattagtaatggtggtagacacaccttctatccagacagtgtgaaggggcgattcaccatctccagagacaatgccaagaacaccctgtatctgcaaatgagcagtctgaagtctgaggacacagccatgtatttatgtgtaagacagactgggacggagggctggtttgcttactggggccaagggactctggtcactgtctctgcaggtggcggaggatctggcggaggtggaagcggcggaggcggatccgatgttgtgatgacccagactccactcactttgtcggttaccattggacaaccagcctccatctcttgcaagtcaagtcagagcctcttagatagtgatggaaagacatatttgaattggttgttacagaggccaggccagtctccaaagcgcctaatctatctggtgtctaaactggactctggagtccctgacaggttcactggcagtggatcagggacagatttcacactgaaaatcagcagagtggaggctgaggatttgggagtttattattgctggcaaggtacacattttcctcagacgttcggtggaggcaccaagctggaaatcaaaacaacaacccctgcccccagacctcctaccccagcccctacaattgccagccagcctctgagcctgaggcccgaggcttgtagacctgctgctggcggagccgtgcacaccagaggactggatttcgcctgcgacatctacatctgggcgcccttggccgggacttgtggggtccttctcctgtcactggttatcaccctttactgcaggagtaagaggagcaggctcctgcacagtgactacatgaacatgactcctagaagacctgggcctaccagaaagcattaccagccctatgccccaccacgcgacttcgcagcctatcgctccagagtgaagttcagcaggagcgcagacgcccccgcgtacaagcagggccagaaccagctctataacgagctcaatctaggacgaagagaggagtacgatgttttggacaagagacgtggccgggaccctgagatggggggaaagccgagaaggaagaaccctcaggaaggcctgttcaatgaactgcagaaagataagatggcggaggccttcagtgagattgggatgaaaggcgagcgccggaggggcaaggggcacgatggccttttccagggtctcagtacagccaccaaggacaccttcgacgcccttcacatgcaggccctgccccctcgctgataa

SEQ ID NO: 1615 - protein, 489 aa, Artificial Sequence
  mu25E6CAR T8283z1XX
MALPVTALLLPLALLLHAARPEVQLVESGGDLVKPGGSLKLSCAASGFTFSSYGMSWVRQTPDKRLEWVATISNGGRHTFYPDSVKGRFTISRDNAKNTLYLQMSSLKSEDTAMYLCVRQTGTEGWFAYWGQGTLVTVSAGGGGSGGGGSGGGGSDVVMTQTPLTLSVTIGQPASISCKSSQSLLDSDGKTYLNWLLQRPGQSPKRLIYLVSKLDSGVPDRFTGSGSGTDFTLKISRVEAEDLGVYYCWQGTHFPQTFGGGTKLEIKTTTPAPRPPTPAPTIASQPLSLRPEACRPAAGGAVHTRGLDFACDIYIWAPLAGTCGVLLLSLVITLYCRSKRSRLLHSDYMNMTPRRPGPTRKHYQPYAPPRDFAAYRSRVKFSRSADAPAYKQGQNQLYNELNLGRREEYDVLDKRRGRDPEMGGKPRRKNPQEGLFNELQKDKMAEAFSEIGMKGERRRGKGHDGLFQGLSTATKDTFDALHMQALPPR

SEQ ID NO: 1616 - DNA, 1473 bp, Artificial Sequence
  hu25E6CAR T8283z1XX
atggccttaccagtgaccgccttgctcctgccgctggccttgctgctccacgccgccaggccggaggtgcagctggtggaatctggcggaggactggtcaagcctggaggcagcctgagactgagctgcgccgccagcggcttcacattcagcagctacggcatgagctgggtgcggcaggcccctggcaagggcctggaatgggtcagcaccatcagcaacggcggaagacacaccttctaccccgacagcgtgaagggcagattcaccatctcaagagataacgccaagaacagcctgtacctgcagatgaacagcctgcgggccgaggacaccgccgtgtactactgcgccagacagaccggcacagagggctggttcgcctactggggccagggcaccctggtgaccgtgtccagcggcggtggcggaagcggaggcggtggctccggtggcggaggcagcgacatcgtgatgacccagacccctctgtctctgagcgtgacccctggccagcctgccagcatctcttgtaaaagcagccagagcctgctggacagcgacggcaagacctacctgaactggtacctgcagaagcccggccaaagccctcagctgctgatctacctggtgtccaagctggatagcggtgttcctgatagattcagcggatctggcagcggcaccgacttcaccctgaagatcagcagagtggaagccgaggacgtgggcgtgtactactgctggcagggcacacacttcccccagacattcggccagggcaccaaggtggaaatcaagacaacaacccctgcccccagacctcctaccccagcccctacaattgccagccagcctctgagcctgaggcccgaggcttgtagacctgctgctggcggagccgtgcacaccagaggactggatttcgcctgcgacatctacatctgggcgcccttggccgggacttgtggggtccttctcctgtcactggttatcaccctttactgcaggagtaagaggagcaggctcctgcacagtgactacatgaacatgactcctagaagacctgggcctaccagaaagcattaccagccctatgccccaccacgcgacttcgcagcctatcgctccagagtgaagttcagcaggagcgcagacgcccccgcgtacaagcagggccagaaccagctctataacgagctcaatctaggacgaagagaggagtacgatgttttggacaagagacgtggccgggaccctgagatggggggaaagccgagaaggaagaaccctcaggaaggcctgttcaatgaactgcagaaagataagatggcggaggccttcagtgagattgggatgaaaggcgagcgccggaggggcaaggggcacgatggccttttccagggtctcagtacagccaccaaggacaccttcgacgcccttcacatgcaggccctgccccctcgctgataa

SEQ ID NO: 1617 - protein, 489 aa, Artificial Sequence
  hu25E6CAR T8283z1XX
MALPVTALLLPLALLLHAARPEVQLVESGGGLVKPGGSLRLSCAASGFTFSSYGMSWVRQAPGKGLEWVSTISNGGRHTFYPDSVKGRFTISRDNAKNSLYLQMNSLRAEDTAVYYCARQTGTEGWFAYWGQGTLVTVSSGGGGSGGGGSGGGGSDIVMTQTPLSLSVTPGQPASISCKSSQSLLDSDGKTYLNWYLQKPGQSPQLLIYLVSKLDSGVPDRFSGSGSGTDFTLKISRVEAEDVGVYYCWQGTHFPQTFGQGTKVEIKTTTPAPRPPTPAPTIASQPLSLRPEACRPAAGGAVHTRGLDFACDIYIWAPLAGTCGVLLLSLVITLYCRSKRSRLLHSDYMNMTPRRPGPTRKHYQPYAPPRDFAAYRSRVKFSRSADAPAYKQGQNQLYNELNLGRREEYDVLDKRRGRDPEMGGKPRRKNPQEGLFNELQKDKMAEAFSEIGMKGERRRGKGHDGLFQGLSTATKDTFDALHMQALPPR

SEQ ID NO: 1618 - DNA, 1533 bp, Artificial Sequence
  MNC21XX - muMNC2CAR T841BB3z1XX
atggccttaccagtgaccgccttgctcctgccgctggccttgctgctccacgccgccaggccggaggtccagctggaggagtcagggggaggcttagtgaagcctggagggtccctgaaactctcctgtgcagcctctggattcactttcagtggctatgccatgtcttgggttcgccagactccggagaagaggctggagtgggtcgcaaccattagtagtggtggtacttatatctactatccagacagtgtgaaggggcgattcaccatctccagagacaatgccaagaacaccctgtacctgcaaatgagcagtctgaggtctgaggacacggccatgtattactgtgcaagacttgggggggataattactacgaatacttcgatgtctggggcgcagggaccacggtcaccgtctcctccgccaaaacgacacccccatctgtctatggcggtggcggatccggcggtggcggatccggcggtggcggatccgacattgtgatcacacagtctacagcttccttaggtgtatctctggggcagagggccaccatctcatgcagggccagcaaaagtgtcagtacatctggctatagttatatgcactggtaccaacagagaccaggacagccacccaaactcctcatctatcttgcatccaacctagaatctggggtccctgccaggttcagtggcagtgggtctgggacagacttcaccctcaacatccatcctgtggaggaggaggatgctgcaacctattactgtcagcacagtagggagcttccgttcacgttcggaggggggaccaagctggagataaaacgggctgatgctgcaccaactgtatccacaacaacccctgcccccagacctcctaccccagcccctacaattgccagccagcctctgagcctgaggcccgaggcttgtagacctgctgctggcggagccgtgcacaccagaggactggatttcgcctgcgacatctacatctgggcgcccttggccgggacttgtggggtccttctcctgtcactggttatcaccctttactgcaaacggggcagaaagaaactcctgtatatattcaaacaaccatttatgagaccagtacaaactactcaagaggaagatggctgtagctgccgatttccagaagaagaagaaggaggatgtgaactgagagtgaagttcagcaggagcgcagacgcccccgcgtacaagcagggccagaaccagctctataacgagctcaatctaggacgaagagaggagtacgatgttttggacaagagacgtggccgggaccctgagatggggggaaagccgagaaggaagaaccctcaggaaggcctgttcaatgaactgcagaaagataagatggcggaggccttcagtgagattgggatgaaaggcgagcgccggaggggcaaggggcacgatggccttttccagggtctcagtacagccaccaaggacaccttcgacgcccttcacatgcaggccctgccccctcgctgataa

SEQ ID NO: 1619 - protein, 509 aa, Artificial Sequence
  MNC21XX - muMNC2CAR T841BB3z1XX
MALPVTALLLPLALLLHAARPEVQLEESGGGLVKPGGSLKLSCAASGFTFSGYAMSWVRQTPEKRLEWVATISSGGTYIYYPDSVKGRFTISRDNAKNTLYLQMSSLRSEDTAMYYCARLGGDNYYEYFDVWGAGTTVTVSSAKTTPPSVYGGGGSGGGGSGGGGSDIVITQSTASLGVSLGQRATISCRASKSVSTSGYSYMHWYQQRPGQPPKLLIYLASNLESGVPARFSGSGSGTDFTLNIHPVEEEDAATYYCQHSRELPFTFGGGTKLEIKRADAAPTVSTTTPAPRPPTPAPTIASQPLSLRPEACRPAAGGAVHTRGLDFACDIYIWAPLAGTCGVLLLSLVITLYCKRGRKKLLYIFKQPFMRPVQTTQEEDGCSCRFPEEEEGGCELRVKFSRSADAPAYKQGQNQLYNELNLGRREEYDVLDKRRGRDPEMGGKPRRKNPQEGLFNELQKDKMAEAFSEIGMKGERRRGKGHDGLFQGLSTATKDTFDALHMQALPPR

SEQ ID NO: 1620 - DNA, 1485 bp, Artificial Sequence
  huMNC2CAR T841BB3z1XX
atggccttaccagtgaccgccttgctcctgccgctggccttgctgctccacgccgccaggccggaggtgcagctggtggagtctgggggaggcctggtcaagcctggggggtccctgagactctcctgtgcagcctctggattcaccttcagtggctatgccatgagctgggtccgccaggctccagggaaggggctggagtgggtctcaaccattagtagtggcggaacctacatatactaccccgactcagtgaagggccgattcaccatctccagagacaacgccaagaactcactgtatctgcaaatgaacagcctgagagccgaggacacggccgtgtattactgtgcgagacttgggggggataattactacgaatacttcgatgtctggggcaaagggaccacggtcaccgtctcctccggcggtggcggatccggcggtggcggatccggcggtggcggatccgacattgtgctgacccagtctccagcctccttggccgtgtctccaggacagagggccaccatcacctgcagagccagtaagagtgtcagtaccagcggatactcctacatgcactggtatcagcagaaaccaggacaacctcctaaactcctgatttacctggcatccaatctggagagcggggtcccagccaggttcagcggcagtgggtctgggaccgatttcaccctcacaattaatcctgtggaagctaatgatactgcaaattattactgtcagcacagtagggagctgcctttcacattcggcggagggaccaaggtggagatcaaacgaactacaacaacccctgcccccagacctcctaccccagcccctacaattgccagccagcctctgagcctgaggcccgaggcttgtagacctgctgctggcggagccgtgcacaccagaggactggatttcgcctgcgacatctacatctgggcgcccttggccgggacttgtggggtccttctcctgtcactggttatcaccctttactgcaaacggggcagaaagaaactcctgtatatattcaaacaaccatttatgagaccagtacaaactactcaagaggaagatggctgtagctgccgatttccagaagaagaagaaggaggatgtgaactgagagtgaagttcagcaggagcgcagacgcccccgcgtacaagcagggccagaaccagctctataacgagctcaatctaggacgaagagaggagtacgatgttttggacaagagacgtggccgggaccctgagatggggggaaagccgagaaggaagaaccctcaggaaggcctgttcaatgaactgcagaaagataagatggcggaggccttcagtgagattgggatgaaaggcgagcgccggaggggcaaggggcacgatggccttttccagggtctcagtacagccaccaaggacaccttcgacgcccttcacatgcaggccctgccccctcgctgataa

SEQ ID NO: 1621 - protein, 493 aa, Artificial Sequence
  huMNC2CAR T841BB3z1XX
MALPVTALLLPLALLLHAARPEVQLVESGGGLVKPGGSLRLSCAASGFTFSGYAMSWVRQAPGKGLEWVSTISSGGTYIYYPDSVKGRFTISRDNAKNSLYLQMNSLRAEDTAVYYCARLGGDNYYEYFDVWGKGTTVTVSSGGGGSGGGGSGGGGSDIVLTQSPASLAVSPGQRATITCRASKSVSTSGYSYMHWYQQKPGQPPKLLIYLASNLESGVPARFSGSGSGTDFTLTINPVEANDTANYYCQHSRELPFTFGGGTKVEIKRTTTTPAPRPPTPAPTIASQPLSLRPEACRPAAGGAVHTRGLDFACDIYIWAPLAGTCGVLLLSLVITLYCKRGRKKLLYIFKQPFMRPVQTTQEEDGCSCRFPEEEEGGCELRVKFSRSADAPAYKQGQNQLYNELNLGRREEYDVLDKRRGRDPEMGGKPRRKNPQEGLFNELQKDKMAEAFSEIGMKGERRRGKGHDGLFQGLSTATKDTFDALHMQALPPR

SEQ ID NO: 1622 - DNA, 1530 bp, Artificial Sequence
  muMNC2CAR T8283z1XX
atggccttaccagtgaccgccttgctcctgccgctggccttgctgctccacgccgccaggccggaggtccagctggaggagtcagggggaggcttagtgaagcctggagggtccctgaaactctcctgtgcagcctctggattcactttcagtggctatgccatgtcttgggttcgccagactccggagaagaggctggagtgggtcgcaaccattagtagtggtggtacttatatctactatccagacagtgtgaaggggcgattcaccatctccagagacaatgccaagaacaccctgtacctgcaaatgagcagtctgaggtctgaggacacggccatgtattactgtgcaagacttgggggggataattactacgaatacttcgatgtctggggcgcagggaccacggtcaccgtctcctccgccaaaacgacacccccatctgtctatggcggtggcggatccggcggtggcggatccggcggtggcggatccgacattgtgatcacacagtctacagcttccttaggtgtatctctggggcagagggccaccatctcatgcagggccagcaaaagtgtcagtacatctggctatagttatatgcactggtaccaacagagaccaggacagccacccaaactcctcatctatcttgcatccaacctagaatctggggtccctgccaggttcagtggcagtgggtctgggacagacttcaccctcaacatccatcctgtggaggaggaggatgctgcaacctattactgtcagcacagtagggagcttccgttcacgttcggaggggggaccaagctggagataaaacgggctgatgctgcaccaactgtatccacaacaacccctgcccccagacctcctaccccagcccctacaattgccagccagcctctgagcctgaggcccgaggcttgtagacctgctgctggcggagccgtgcacaccagaggactggatttcgcctgcgacatctacatctgggcgcccttggccgggacttgtggggtccttctcctgtcactggttatcaccctttactgcaggagtaagaggagcaggctcctgcacagtgactacatgaacatgactcctagaagacctgggcctaccagaaagcattaccagccctatgccccaccacgcgacttcgcagcctatcgctccagagtgaagttcagcaggagcgcagacgcccccgcgtacaagcagggccagaaccagctctataacgagctcaatctaggacgaagagaggagtacgatgttttggacaagagacgtggccgggaccctgagatggggggaaagccgagaaggaagaaccctcaggaaggcctgttcaatgaactgcagaaagataagatggcggaggccttcagtgagattgggatgaaaggcgagcgccggaggggcaaggggcacgatggccttttccagggtctcagtacagccaccaaggacaccttcgacgcccttcacatgcaggccctgccccctcgctgataa

SEQ ID NO: 1623 - protein, 508 aa, Artificial Sequence
  muMNC2CAR T8283z1XX
MALPVTALLLPLALLLHAARPEVQLEESGGGLVKPGGSLKLSCAASGFTFSGYAMSWVRQTPEKRLEWVATISSGGTYIYYPDSVKGRFTISRDNAKNTLYLQMSSLRSEDTAMYYCARLGGDNYYEYFDVWGAGTTVTVSSAKTTPPSVYGGGGSGGGGSGGGGSDIVITQSTASLGVSLGQRATISCRASKSVSTSGYSYMHWYQQRPGQPPKLLIYLASNLESGVPARFSGSGSGTDFTLNIHPVEEEDAATYYCQHSRELPFTFGGGTKLEIKRADAAPTVSTTTPAPRPPTPAPTIASQPLSLRPEACRPAAGGAVHTRGLDFACDIYIWAPLAGTCGVLLLSLVITLYCRSKRSRLLHSDYMNMTPRRPGPTRKHYQPYAPPRDFAAYRSRVKFSRSADAPAYKQGQNQLYNELNLGRREEYDVLDKRRGRDPEMGGKPRRKNPQEGLFNELQKDKMAEAFSEIGMKGERRRGKGHDGLFQGLSTATKDTFDALHMQALPPR

SEQ ID NO: 1624 - DNA, 1482 bp, Artificial Sequence
  huMNC2CAR T8283z1XX
atggccttaccagtgaccgccttgctcctgccgctggccttgctgctccacgccgccaggccggaggtgcagctggtggagtctgggggaggcctggtcaagcctggggggtccctgagactctcctgtgcagcctctggattcaccttcagtggctatgccatgagctgggtccgccaggctccagggaaggggctggagtgggtctcaaccattagtagtggcggaacctacatatactaccccgactcagtgaagggccgattcaccatctccagagacaacgccaagaactcactgtatctgcaaatgaacagcctgagagccgaggacacggccgtgtattactgtgcgagacttgggggggataattactacgaatacttcgatgtctggggcaaagggaccacggtcaccgtctcctccggcggtggcggatccggcggtggcggatccggcggtggcggatccgacattgtgctgacccagtctccagcctccttggccgtgtctccaggacagagggccaccatcacctgcagagccagtaagagtgtcagtaccagcggatactcctacatgcactggtatcagcagaaaccaggacaacctcctaaactcctgatttacctggcatccaatctggagagcggggtcccagccaggttcagcggcagtgggtctgggaccgatttcaccctcacaattaatcctgtggaagctaatgatactgcaaattattactgtcagcacagtagggagctgcctttcacattcggcggagggaccaaggtggagatcaaacgaactacaacaacccctgcccccagacctcctaccccagcccctacaattgccagccagcctctgagcctgaggcccgaggcttgtagacctgctgctggcggagccgtgcacaccagaggactggatttcgcctgcgacatctacatctgggcgcccttggccgggacttgtggggtccttctcctgtcactggttatcaccctttactgcaggagtaagaggagcaggctcctgcacagtgactacatgaacatgactcctagaagacctgggcctaccagaaagcattaccagccctatgccccaccacgcgacttcgcagcctatcgctccagagtgaagttcagcaggagcgcagacgcccccgcgtacaagcagggccagaaccagctctataacgagctcaatctaggacgaagagaggagtacgatgttttggacaagagacgtggccgggaccctgagatggggggaaagccgagaaggaagaaccctcaggaaggcctgttcaatgaactgcagaaagataagatggcggaggccttcagtgagattgggatgaaaggcgagcgccggaggggcaaggggcacgatggccttttccagggtctcagtacagccaccaaggacaccttcgacgcccttcacatgcaggccctgccccctcgctgataa

SEQ ID NO: 1625 - protein, 492 aa, Artificial Sequence
  huMNC2CAR T8283z1XX
MALPVTALLLPLALLLHAARPEVQLVESGGGLVKPGGSLRLSCAASGFTFSGYAMSWVRQAPGKGLEWVSTISSGGTYIYYPDSVKGRFTISRDNAKNSLYLQMNSLRAEDTAVYYCARLGGDNYYEYFDVWGKGTTVTVSSGGGGSGGGGSGGGGSDIVLTQSPASLAVSPGQRATITCRASKSVSTSGYSYMHWYQQKPGQPPKLLIYLASNLESGVPARFSGSGSGTDFTLTINPVEANDTANYYCQHSRELPFTFGGGTKVEIKRTTTTPAPRPPTPAPTIASQPLSLRPEACRPAAGGAVHTRGLDFACDIYIWAPLAGTCGVLLLSLVITLYCRSKRSRLLHSDYMNMTPRRPGPTRKHYQPYAPPRDFAAYRSRVKFSRSADAPAYKQGQNQLYNELNLGRREEYDVLDKRRGRDPEMGGKPRRKNPQEGLFNELQKDKMAEAFSEIGMKGERRRGKGHDGLFQGLSTATKDTFDALHMQALPPR

SEQ ID NO: 1626 - DNA, 1467 bp, Artificial Sequence
  MNE61XX - muMNE6CAR T841BB3z1XX
atggccttaccagtgaccgccttgctcctgccgctggccttgctgctccacgccgccaggccggaggtgaaggtggtggagtctgggggagacttagtgaagcctggagggtccctgaaactctcctgtgtagtctctggattcactttcagtagatatggcatgtcttgggttcgccagactccaggcaagaggctggagtgggtcgcaaccattagtggtggcggtacttacatctactatccagacagtgtgaaggggcgattcaccatctccagagacaatgccaagaacaccctgtacctgcaaatgagcagtctgaagtctgaggacacagccatgtatcactgtacaagggataactacggtaggaactacgactacggtatggactactggggtcaaggaacctcagtcaccgtctcctcaggcggtggcggatccggcggtggcggatccggcggtggcggatcccaaattgttctcacccagtctccagcaatcatgtctgcatctccaggggaggaggtcaccctaacctgcagtgccacctcaagtgtaagttacatacactggttccagcagaggccaggcacttctcccaaactctggatttatagcacatccaacctggcttctggagtccctgttcgcttcagtggcagtggatatgggacctcttactctctcacaatcagccgaatggaggctgaagatgctgccacttattactgccagcaaaggagtagttccccattcacgttcggctcggggacaaagttggaaataaaaacaacaacccctgcccccagacctcctaccccagcccctacaattgccagccagcctctgagcctgaggcccgaggcttgtagacctgctgctggcggagccgtgcacaccagaggactggatttcgcctgcgacatctacatctgggcgcccttggccgggacttgtggggtccttctcctgtcactggttatcaccctttactgcaaacggggcagaaagaaactcctgtatatattcaaacaaccatttatgagaccagtacaaactactcaagaggaagatggctgtagctgccgatttccagaagaagaagaaggaggatgtgaactgagagtgaagttcagcaggagcgcagacgcccccgcgtacaagcagggccagaaccagctctataacgagctcaatctaggacgaagagaggagtacgatgttttggacaagagacgtggccgggaccctgagatggggggaaagccgagaaggaagaaccctcaggaaggcctgttcaatgaactgcagaaagataagatggcggaggccttcagtgagattgggatgaaaggcgagcgccggaggggcaaggggcacgatggccttttccagggtctcagtacagccaccaaggacaccttcgacgcccttcacatgcaggccctgccccctcgctgataa

SEQ ID NO: 1627 - protein, 487 aa, Artificial Sequence
  MNE61XX - muMNE6CAR T841BB3z1XX
MALPVTALLLPLALLLHAARPEVKVVESGGDLVKPGGSLKLSCVVSGFTFSRYGMSWVRQTPGKRLEWVATISGGGTYIYYPDSVKGRFTISRDNAKNTLYLQMSSLKSEDTAMYHCTRDNYGRNYDYGMDYWGQGTSVTVSSGGGGSGGGGSGGGGSQIVLTQSPAIMSASPGEEVTLTCSATSSVSYIHWFQQRPGTSPKLWIYSTSNLASGVPVRFSGSGYGTSYSLTISRMEAEDAATYYCQQRSSSPFTFGSGTKLEIKTTTPAPRPPTPAPTIASQPLSLRPEACRPAAGGAVHTRGLDFACDIYIWAPLAGTCGVLLLSLVITLYCKRGRKKLLYIFKQPFMRPVQTTQEEDGCSCRFPEEEEGGCELRVKFSRSADAPAYKQGQNQLYNELNLGRREEYDVLDKRRGRDPEMGGKPRRKNPQEGLFNELQKDKMAEAFSEIGMKGERRRGKGHDGLFQGLSTATKDTFDALHMQALPPR

SEQ ID NO: 1628 - DNA, 1467 bp, Artificial Sequence
  huMNE6CAR T841BB3z1XX
atggccttaccagtgaccgccttgctcctgccgctggccttgctgctccacgccgccaggccggaggtgcagctggtggagtctgggggaggcctggtcaagcctggggggtccctgagactctcctgtgcagcctctggattcaccttcagtaggtatggcatgagctgggtccgccaggctccagggaagaggctggagtgggtctcaaccattagtggcggaggcacctacatatactacccagactcagtgaagggccgattcaccatctccagagacaacgccaagaacaccctgtatctgcaaatgaacagcctgagagccgaggacacggctgtgtattactgtaccagagataactatggccgcaactatgattatggcatggattattggggccagggcaccctggtgaccgtgagcagcggcggtggcggatccggcggtggcggatccggcggtggcggatccgaaattgtgttgacacagtctccagccaccctgtctttgtctccaggggaaagagccaccctcacctgcagcgccaccagcagtgttagctacatccactggtaccaacagaggcctggccagagccccaggctcctcatctatagcacctccaacctggccagcggcatcccagccaggttcagtggcagtgggtctgggagcgactacactctcaccatcagcagcctagagcctgaagattttgcagtttattactgtcagcagcgtagcagctcccctttcacctttggcagcggcaccaaagtggaaattaaaacaacaacccctgcccccagacctcctaccccagcccctacaattgccagccagcctctgagcctgaggcccgaggcttgtagacctgctgctggcggagccgtgcacaccagaggactggatttcgcctgcgacatctacatctgggcgcccttggccgggacttgtggggtccttctcctgtcactggttatcaccctttactgcaaacggggcagaaagaaactcctgtatatattcaaacaaccatttatgagaccagtacaaactactcaagaggaagatggctgtagctgccgatttccagaagaagaagaaggaggatgtgaactgagagtgaagttcagcaggagcgcagacgcccccgcgtacaagcagggccagaaccagctctataacgagctcaatctaggacgaagagaggagtacgatgttttggacaagagacgtggccgggaccctgagatggggggaaagccgagaaggaagaaccctcaggaaggcctgttcaatgaactgcagaaagataagatggcggaggccttcagtgagattgggatgaaaggcgagcgccggaggggcaaggggcacgatggccttttccagggtctcagtacagccaccaaggacaccttcgacgcccttcacatgcaggccctgccccctcgctgataa

SEQ ID NO: 1629 - protein, 487 aa, Artificial Sequence
  huMNE6CAR T841BB3z1XX
MALPVTALLLPLALLLHAARPEVQLVESGGGLVKPGGSLRLSCAASGFTFSRYGMSWVRQAPGKRLEWVSTISGGGTYIYYPDSVKGRFTISRDNAKNTLYLQMNSLRAEDTAVYYCTRDNYGRNYDYGMDYWGQGTLVTVSSGGGGSGGGGSGGGGSEIVLTQSPATLSLSPGERATLTCSATSSVSYIHWYQQRPGQSPRLLIYSTSNLASGIPARFSGSGSGSDYTLTISSLEPEDFAVYYCQQRSSSPFTFGSGTKVEIKTTTPAPRPPTPAPTIASQPLSLRPEACRPAAGGAVHTRGLDFACDIYIWAPLAGTCGVLLLSLVITLYCKRGRKKLLYIFKQPFMRPVQTTQEEDGCSCRFPEEEEGGCELRVKFSRSADAPAYKQGQNQLYNELNLGRREEYDVLDKRRGRDPEMGGKPRRKNPQEGLFNELQKDKMAEAFSEIGMKGERRRGKGHDGLFQGLSTATKDTFDALHMQALPPR

SEQ ID NO: 1630 - DNA, 1464 bp, Artificial Sequence
  muMNE6CAR T84283z1XX
atggccttaccagtgaccgccttgctcctgccgctggccttgctgctccacgccgccaggccggaggtgaaggtggtggagtctgggggagacttagtgaagcctggagggtccctgaaactctcctgtgtagtctctggattcactttcagtagatatggcatgtcttgggttcgccagactccaggcaagaggctggagtgggtcgcaaccattagtggtggcggtacttacatctactatccagacagtgtgaaggggcgattcaccatctccagagacaatgccaagaacaccctgtacctgcaaatgagcagtctgaagtctgaggacacagccatgtatcactgtacaagggataactacggtaggaactacgactacggtatggactactggggtcaaggaacctcagtcaccgtctcctcaggcggtggcggatccggcggtggcggatccggcggtggcggatcccaaattgttctcacccagtctccagcaatcatgtctgcatctccaggggaggaggtcaccctaacctgcagtgccacctcaagtgtaagttacatacactggttccagcagaggccaggcacttctcccaaactctggatttatagcacatccaacctggcttctggagtccctgttcgcttcagtggcagtggatatgggacctcttactctctcacaatcagccgaatggaggctgaagatgctgccacttattactgccagcaaaggagtagttccccattcacgttcggctcggggacaaagttggaaataaaaacaacaacccctgcccccagacctcctaccccagcccctacaattgccagccagcctctgagcctgaggcccgaggcttgtagacctgctgctggcggagccgtgcacaccagaggactggatttcgcctgcgacatctacatctgggcgcccttggccgggacttgtggggtccttctcctgtcactggttatcaccctttactgcaggagtaagaggagcaggctcctgcacagtgactacatgaacatgactcctagaagacctgggcctaccagaaagcattaccagccctatgccccaccacgcgacttcgcagcctatcgctccagagtgaagttcagcaggagcgcagacgcccccgcgtacaagcagggccagaaccagctctataacgagctcaatctaggacgaagagaggagtacgatgttttggacaagagacgtggccgggaccctgagatggggggaaagccgagaaggaagaaccctcaggaaggcctgttcaatgaactgcagaaagataagatggcggaggccttcagtgagattgggatgaaaggcgagcgccggaggggcaaggggcacgatggccttttccagggtctcagtacagccaccaaggacaccttcgacgcccttcacatgcaggccctgccccctcgctgataa

SEQ ID NO: 1631 - protein, 486 aa, Artificial Sequence
  muMNE6CAR T84283z1XX
MALPVTALLLPLALLLHAARPEVKVVESGGDLVKPGGSLKLSCVVSGFTFSRYGMSWVRQTPGKRLEWVATISGGGTYIYYPDSVKGRFTISRDNAKNTLYLQMSSLKSEDTAMYHCTRDNYGRNYDYGMDYWGQGTSVTVSSGGGGSGGGGSGGGGSQIVLTQSPAIMSASPGEEVTLTCSATSSVSYIHWFQQRPGTSPKLWIYSTSNLASGVPVRFSGSGYGTSYSLTISRMEAEDAATYYCQQRSSSPFTFGSGTKLEIKTTTPAPRPPTPAPTIASQPLSLRPEACRPAAGGAVHTRGLDFACDIYIWAPLAGTCGVLLLSLVITLYCRSKRSRLLHSDYMNMTPRRPGPTRKHYQPYAPPRDFAAYRSRVKFSRSADAPAYKQGQNQLYNELNLGRREEYDVLDKRRGRDPEMGGKPRRKNPQEGLFNELQKDKMAEAFSEIGMKGERRRGKGHDGLFQGLSTATKDTFDALHMQALPPR

SEQ ID NO: 1632 - DNA, 1464 bp, Artificial Sequence
  huMNE6CAR T84283z1XX
atggccttaccagtgaccgccttgctcctgccgctggccttgctgctccacgccgccaggccggaggtgcagctggtggagtctgggggaggcctggtcaagcctggggggtccctgagactctcctgtgcagcctctggattcaccttcagtaggtatggcatgagctgggtccgccaggctccagggaagaggctggagtgggtctcaaccattagtggcggaggcacctacatatactacccagactcagtgaagggccgattcaccatctccagagacaacgccaagaacaccctgtatctgcaaatgaacagcctgagagccgaggacacggctgtgtattactgtaccagagataactatggccgcaactatgattatggcatggattattggggccagggcaccctggtgaccgtgagcagcggcggtggcggatccggcggtggcggatccggcggtggcggatccgaaattgtgttgacacagtctccagccaccctgtctttgtctccaggggaaagagccaccctcacctgcagcgccaccagcagtgttagctacatccactggtaccaacagaggcctggccagagccccaggctcctcatctatagcacctccaacctggccagcggcatcccagccaggttcagtggcagtgggtctgggagcgactacactctcaccatcagcagcctagagcctgaagattttgcagtttattactgtcagcagcgtagcagctcccctttcacctttggcagcggcaccaaagtggaaattaaaacaacaacccctgcccccagacctcctaccccagcccctacaattgccagccagcctctgagcctgaggcccgaggcttgtagacctgctgctggcggagccgtgcacaccagaggactggatttcgcctgcgacatctacatctgggcgcccttggccgggacttgtggggtccttctcctgtcactggttatcaccctttactgcaggagtaagaggagcaggctcctgcacagtgactacatgaacatgactcctagaagacctgggcctaccagaaagcattaccagccctatgccccaccacgcgacttcgcagcctatcgctccagagtgaagttcagcaggagcgcagacgcccccgcgtacaagcagggccagaaccagctctataacgagctcaatctaggacgaagagaggagtacgatgttttggacaagagacgtggccgggaccctgagatggggggaaagccgagaaggaagaaccctcaggaaggcctgttcaatgaactgcagaaagataagatggcggaggccttcagtgagattgggatgaaaggcgagcgccggaggggcaaggggcacgatggccttttccagggtctcagtacagccaccaaggacaccttcgacgcccttcacatgcaggccctgccccctcgctgataa

SEQ ID NO: 1633 - protein, 486 aa, Artificial Sequence
  huMNE6CAR T84283z1XX
MALPVTALLLPLALLLHAARPEVQLVESGGGLVKPGGSLRLSCAASGFTFSRYGMSWVRQAPGKRLEWVSTISGGGTYIYYPDSVKGRFTISRDNAKNTLYLQMNSLRAEDTAVYYCTRDNYGRNYDYGMDYWGQGTLVTVSSGGGGSGGGGSGGGGSEIVLTQSPATLSLSPGERATLTCSATSSVSYIHWYQQRPGQSPRLLIYSTSNLASGIPARFSGSGSGSDYTLTISSLEPEDFAVYYCQQRSSSPFTFGSGTKVEIKTTTPAPRPPTPAPTIASQPLSLRPEACRPAAGGAVHTRGLDFACDIYIWAPLAGTCGVLLLSLVITLYCRSKRSRLLHSDYMNMTPRRPGPTRKHYQPYAPPRDFAAYRSRVKFSRSADAPAYKQGQNQLYNELNLGRREEYDVLDKRRGRDPEMGGKPRRKNPQEGLFNELQKDKMAEAFSEIGMKGERRRGKGHDGLFQGLSTATKDTFDALHMQALPPR

SEQ ID NO: 1634 - DNA, 117 bp, Artificial Sequence
  Minimal CMV promoter (mCMV)
taggcgtgtacggtgggaggcctatataagcagagctcgtttagtgaaccgtcagatcgcctggagacgccatccacgctgttttgacctccatagaagacaccgggaccgatccag

SEQ ID NO: 1635 - DNA, 114 bp, Artificial Sequence
  Minimal IL2 promoter (mIL2P)
cattttgacacccccataatatttttccagaattaacagtataaattgcatctcttgttcaagagttccctatcactctctttaatcactactcacagtaacctcaactcctgc

SEQ ID NO: 1636 - DNA, 31 bp, Artificial Sequence
  Minimal promoter, miniP
agagggtatataatggaagctcgacttccag

SEQ ID NO: 1637 - DNA, 540 bp, Artificial Sequence
  IL18 activated
atggccttaccagtgaccgccttgctcctgccgctggccttgctgctccacgccgccaggccgtacttcggcaagctggaaagcaagctgagcgtgatccggaacctgaacgaccaggtgctgttcatcgatcagggcaacagacccctgttcgaggacatgaccgacagcgactgcagagacaacgcccctcggaccatcttcatcatcagcatgtacaaggacagccagcctagaggcatggccgtgaccatctctgtgaagtgcgagaagatcagcaccctgagctgcgagaacaagatcatcagcttcaaagagatgaacccgccggacaacatcaaggacaccaagagcgacatcatattcttccagcggagcgtgcccggccacgacaacaagatgcagtttgagagcagcagctacgagggctacttcctggcctgcgagaaagagcgggacctgttcaagctgatcctgaagaaagaggacgaactgggcgaccgcagcatcatgttcaccgtgcagaacgaggactgataa

SEQ ID NO: 1638 - protein, 178 aa, Artificial Sequence
  IL18 activated
MALPVTALLLPLALLLHAARPYFGKLESKLSVIRNLNDQVLFIDQGNRPLFEDMTDSDCRDNAPRTIFIISMYKDSQPRGMAVTISVKCEKISTLSCENKIISFKEMNPPDNIKDTKSDIIFFQRSVPGHDNKMQFESSSYEGYFLACEKERDLFKLILKKEDELGDRSIMFTVQNED

SEQ ID NO: 1639 - DNA, 770 bp, Artificial Sequence
  Foxp3NFATc1X3IL18
ggcttcattttttccatttactgcagaggcttcattttttccatttactgcagaggcttcattttttccatttactgcagaactagttaggcgtgtacggtgggaggcctatataagcagagctcgtttagtgaaccgtcagatcgcctggagacgccatccacgctgttttgacctccatagaagacaccgggaccgatccagcctcgagagacccaatgctagccaccatggccttaccagtgaccgccttgctcctgccgctggccttgctgctccacgccgccaggccgtacttcggcaagctggaaagcaagctgagcgtgatccggaacctgaacgaccaggtgctgttcatcgatcagggcaacagacccctgttcgaggacatgaccgacagcgactgcagagacaacgcccctcggaccatcttcatcatcagcatgtacaaggacagccagcctagaggcatggccgtgaccatctctgtgaagtgcgagaagatcagcaccctgagctgcgagaacaagatcatcagcttcaaagagatgaacccgccggacaacatcaaggacaccaagagcgacatcatattcttccagcggagcgtgcccggccacgacaacaagatgcagtttgagagcagcagctacgagggctacttcctggcctgcgagaaagagcgggacctgttcaagctgatcctgaagaaagaggacgaactgggcgaccgcagcatcatgttcaccgtgcagaacgaggactgataa

SEQ ID NO: 1640 - DNA, 850 bp, Artificial Sequence
  Foxp3NFATc1X6IL18
gcttcattttttccatttactgcagaggcttcattttttccatttactgcagaggcttcattttttccatttactgcagaggcttcattttttccatttactgcagaggcttcattttttccatttactgcagaggcttcattttttccatttactgcagaactagttaggcgtgtacggtgggaggcctatataagcagagctcgtttagtgaaccgtcagatcgcctggagacgccatccacgctgttttgacctccatagaagacaccgggaccgatccagcctcgagagacccaatgctagccaccatggccttaccagtgaccgccttgctcctgccgctggccttgctgctccacgccgccaggccgtacttcggcaagctggaaagcaagctgagcgtgatccggaacctgaacgaccaggtgctgttcatcgatcagggcaacagacccctgttcgaggacatgaccgacagcgactgcagagacaacgcccctcggaccatcttcatcatcagcatgtacaaggacagccagcctagaggcatggccgtgaccatctctgtgaagtgcgagaagatcagcaccctgagctgcgagaacaagatcatcagcttcaaagagatgaacccgccggacaacatcaaggacaccaagagcgacatcatattcttccagcggagcgtgcccggccacgacaacaagatgcagtttgagagcagcagctacgagggctacttcctggcctgcgagaaagagcgggacctgttcaagctgatcctgaagaaagaggacgaactgggcgaccgcagcatcatgttcaccgtgcagaacgaggactgataa

SEQ ID NO: 1641 - DNA, 779 bp, Artificial Sequence
  IL2NFATc1X3IL18
ggaggaaaaactgtttcatacagaaggcgtggaggaaaaactgtttcatacagaaggcgtggaggaaaaactgtttcatacagaaggcgtactagttaggcgtgtacggtgggaggcctatataagcagagctcgtttagtgaaccgtcagatcgcctggagacgccatccacgctgttttgacctccatagaagacaccgggaccgatccagcctcgagagacccaatgctagccaccatggccttaccagtgaccgccttgctcctgccgctggccttgctgctccacgccgccaggccgtacttcggcaagctggaaagcaagctgagcgtgatccggaacctgaacgaccaggtgctgttcatcgatcagggcaacagacccctgttcgaggacatgaccgacagcgactgcagagacaacgcccctcggaccatcttcatcatcagcatgtacaaggacagccagcctagaggcatggccgtgaccatctctgtgaagtgcgagaagatcagcaccctgagctgcgagaacaagatcatcagcttcaaagagatgaacccgccggacaacatcaaggacaccaagagcgacatcatattcttccagcggagcgtgcccggccacgacaacaagatgcagtttgagagcagcagctacgagggctacttcctggcctgcgagaaagagcgggacctgttcaagctgatcctgaagaaagaggacgaactgggcgaccgcagcatcatgttcaccgtgcagaacgaggactgataa

SEQ ID NO: 1642 - DNA, 868 bp, Artificial Sequence
  IL2NFATc1X6IL18
ggaggaaaaactgtttcatacagaaggcgtggaggaaaaactgtttcatacagaaggcgtggaggaaaaactgtttcatacagaaggcgtggaggaaaaactgtttcatacagaaggcgtggaggaaaaactgtttcatacagaaggcgtggaggaaaaactgtttcatacagaaggcgtactagttaggcgtgtacggtgggaggcctatataagcagagctcgtttagtgaaccgtcagatcgcctggagacgccatccacgctgttttgacctccatagaagacaccgggaccgatccagctcgagagacccaatgctagccaccatggccttaccagtgaccgccttgctcctgccgctggccttgctgctccacgccgccaggccgtacttcggcaagctggaaagcaagctgagcgtgatccggaacctgaacgaccaggtgctgttcatcgatcagggcaacagacccctgttcgaggacatgaccgacagcgactgcagagacaacgcccctcggaccatcttcatcatcagcatgtacaaggacagccagcctagaggcatggccgtgaccatctctgtgaagtgcgagaagatcagcaccctgagctgcgagaacaagatcatcagcttcaaagagatgaacccgccggacaacatcaaggacaccaagagcgacatcatattcttccagcggagcgtgcccggccacgacaacaagatgcagtttgagagcagcagctacgagggctacttcctggcctgcgagaaagagcgggacctgttcaagctgatcctgaagaaagaggacgaactgggcgaccgcagcatcatgttcaccgtgcagaacgaggactgataa

SEQ ID NO: 1643 - DNA, 2347 bp, Artificial Sequence
  Best antibodies with inducible IL18 +/ 1XX mutations in ITAMs of CD3zeta - MNC2 - muMNC2841BB3zFoxp3NFATIL18
atggccttaccagtgaccgccttgctcctgccgctggccttgctgctccacgccgccaggccggaggtccagctggaggagtcagggggaggcttagtgaagcctggagggtccctgaaactctcctgtgcagcctctggattcactttcagtggctatgccatgtcttgggttcgccagactccggagaagaggctggagtgggtcgcaaccattagtagtggtggtacttatatctactatccagacagtgtgaaggggcgattcaccatctccagagacaatgccaagaacaccctgtacctgcaaatgagcagtctgaggtctgaggacacggccatgtattactgtgcaagacttgggggggataattactacgaatacttcgatgtctggggcgcagggaccacggtcaccgtctcctccgccaaaacgacacccccatctgtctatggcggtggcggatccggcggtggcggatccggcggtggcggatccgacattgtgatcacacagtctacagcttccttaggtgtatctctggggcagagggccaccatctcatgcagggccagcaaaagtgtcagtacatctggctatagttatatgcactggtaccaacagagaccaggacagccacccaaactcctcatctatcttgcatccaacctagaatctggggtccctgccaggttcagtggcagtgggtctgggacagacttcaccctcaacatccatcctgtggaggaggaggatgctgcaacctattactgtcagcacagtagggagcttccgttcacgttcggaggggggaccaagctggagataaaacgggctgatgctgcaccaactgtatccacaacaacccctgcccccagacctcctaccccagcccctacaattgccagccagcctctgagcctgaggcccgaggcttgtagacctgctgctggcggagccgtgcacaccagaggactggatttcgcctgcgacatctacatctgggcgcccttggccgggacttgtggggtccttctcctgtcactggttatcaccctttactgcaaacggggcagaaagaaactcctgtatatattcaaacaaccatttatgagaccagtacaaactactcaagaggaagatggctgtagctgccgatttccagaagaagaagaaggaggatgtgaactgagagtgaagttcagcaggagcgcagacgcccccgcgtacaagcagggccagaaccagctctataacgagctcaatctaggacgaagagaggagtacgatgttttggacaagagacgtggccgggaccctgagatggggggaaagccgagaaggaagaaccctcaggaaggcctgtacaatgaactgcagaaagataagatggcggaggcctacagtgagattgggatgaaaggcgagcgccggaggggcaaggggcacgatggcctttaccagggtctcagtacagccaccaaggacacctacgacgcccttcacatgcaggccctgccccctcgctgataagtttaaactgccagaacatttctctggcctaactggccggtaccggcttcattttttccatttactgcagaggcttcattttttccatttactgcagaggcttcattttttccatttactgcagaactagttaggcgtgtacggtgggaggcctatataagcagagctcgtttagtgaaccgtcagatcgcctggagacgccatccacgctgttttgacctccatagaagacaccgggaccgatccagcctcgagagacccaatgctagccaccatggccttaccagtgaccgccttgctcctgccgctggccttgctgctccacgccgccaggccgtacttcggcaagctggaaagcaagctgagcgtgatccggaacctgaacgaccaggtgctgttcatcgatcagggcaacagacccctgttcgaggacatgaccgacagcgactgcagagacaacgcccctcggaccatcttcatcatcagcatgtacaaggacagccagcctagaggcatggccgtgaccatctctgtgaagtgcgagaagatcagcaccctgagctgcgagaacaagatcatcagcttcaaagagatgaacccgccggacaacatcaaggacaccaagagcgacatcatattcttccagcggagcgtgcccggccacgacaacaagatgcagtttgagagcagcagctacgagggctacttcctggcctgcgagaaagagcgggacctgttcaagctgatcctgaagaaagaggacgaactgggcgaccgcagcatcatgttcaccgtgcagaacgaggactgataa

SEQ ID NO: 1644 - DNA, 2299 bp, Artificial Sequence
  huMNC2841BB3zFoxp3NFATIL18
atggccttaccagtgaccgccttgctcctgccgctggccttgctgctccacgccgccaggccggaggtgcagctggtggagtctgggggaggcctggtcaagcctggggggtccctgagactctcctgtgcagcctctggattcaccttcagtggctatgccatgagctgggtccgccaggctccagggaaggggctggagtgggtctcaaccattagtagtggcggaacctacatatactaccccgactcagtgaagggccgattcaccatctccagagacaacgccaagaactcactgtatctgcaaatgaacagcctgagagccgaggacacggccgtgtattactgtgcgagacttgggggggataattactacgaatacttcgatgtctggggcaaagggaccacggtcaccgtctcctccggcggtggcggatccggcggtggcggatccggcggtggcggatccgacattgtgctgacccagtctccagcctccttggccgtgtctccaggacagagggccaccatcacctgcagagccagtaagagtgtcagtaccagcggatactcctacatgcactggtatcagcagaaaccaggacaacctcctaaactcctgatttacctggcatccaatctggagagcggggtcccagccaggttcagcggcagtgggtctgggaccgatttcaccctcacaattaatcctgtggaagctaatgatactgcaaattattactgtcagcacagtagggagctgcctttcacattcggcggagggaccaaggtggagatcaaacgaactacaacaacccctgcccccagacctcctaccccagcccctacaattgccagccagcctctgagcctgaggcccgaggcttgtagacctgctgctggcggagccgtgcacaccagaggactggatttcgcctgcgacatctacatctgggcgcccttggccgggacttgtggggtccttctcctgtcactggttatcaccctttactgcaaacggggcagaaagaaactcctgtatatattcaaacaaccatttatgagaccagtacaaactactcaagaggaagatggctgtagctgccgatttccagaagaagaagaaggaggatgtgaactgagagtgaagttcagcaggagcgcagacgcccccgcgtacaagcagggccagaaccagctctataacgagctcaatctaggacgaagagaggagtacgatgttttggacaagagacgtggccgggaccctgagatggggggaaagccgagaaggaagaaccctcaggaaggcctgtacaatgaactgcagaaagataagatggcggaggcctacagtgagattgggatgaaaggcgagcgccggaggggcaaggggcacgatggcctttaccagggtctcagtacagccaccaaggacacctacgacgcccttcacatgcaggccctgccccctcgctgataagtttaaactgccagaacatttctctggcctaactggccggtaccggcttcattttttccatttactgcagaggcttcattttttccatttactgcagaggcttcattttttccatttactgcagaactagttaggcgtgtacggtgggaggcctatataagcagagctcgtttagtgaaccgtcagatcgcctggagacgccatccacgctgttttgacctccatagaagacaccgggaccgatccagcctcgagagacccaatgctagccaccatggccttaccagtgaccgccttgctcctgccgctggccttgctgctccacgccgccaggccgtacttcggcaagctggaaagcaagctgagcgtgatccggaacctgaacgaccaggtgctgttcatcgatcagggcaacagacccctgttcgaggacatgaccgacagcgactgcagagacaacgcccctcggaccatcttcatcatcagcatgtacaaggacagccagcctagaggcatggccgtgaccatctctgtgaagtgcgagaagatcagcaccctgagctgcgagaacaagatcatcagcttcaaagagatgaacccgccggacaacatcaaggacaccaagagcgacatcatattcttccagcggagcgtgcccggccacgacaacaagatgcagtttgagagcagcagctacgagggctacttcctggcctgcgagaaagagcgggacctgttcaagctgatcctgaagaaagaggacgaactgggcgaccgcagcatcatgttcaccgtgcagaacgaggactgataa

SEQ ID NO: 1645 - DNA, 2344 bp, Artificial Sequence
  muMNC28283zFoxp3NFATIL18
atggccttaccagtgaccgccttgctcctgccgctggccttgctgctccacgccgccaggccggaggtccagctggaggagtcagggggaggcttagtgaagcctggagggtccctgaaactctcctgtgcagcctctggattcactttcagtggctatgccatgtcttgggttcgccagactccggagaagaggctggagtgggtcgcaaccattagtagtggtggtacttatatctactatccagacagtgtgaaggggcgattcaccatctccagagacaatgccaagaacaccctgtacctgcaaatgagcagtctgaggtctgaggacacggccatgtattactgtgcaagacttgggggggataattactacgaatacttcgatgtctggggcgcagggaccacggtcaccgtctcctccgccaaaacgacacccccatctgtctatggcggtggcggatccggcggtggcggatccggcggtggcggatccgacattgtgatcacacagtctacagcttccttaggtgtatctctggggcagagggccaccatctcatgcagggccagcaaaagtgtcagtacatctggctatagttatatgcactggtaccaacagagaccaggacagccacccaaactcctcatctatcttgcatccaacctagaatctggggtccctgccaggttcagtggcagtgggtctgggacagacttcaccctcaacatccatcctgtggaggaggaggatgctgcaacctattactgtcagcacagtagggagcttccgttcacgttcggaggggggaccaagctggagataaaacgggctgatgctgcaccaactgtatccacaacaacccctgcccccagacctcctaccccagcccctacaattgccagccagcctctgagcctgaggcccgaggcttgtagacctgctgctggcggagccgtgcacaccagaggactggatttcgcctgcgacatctacatctgggcgcccttggccgggacttgtggggtccttctcctgtcactggttatcaccctttactgcaggagtaagaggagcaggctcctgcacagtgactacatgaacatgactcctagaagacctgggcctaccagaaagcattaccagccctatgccccaccacgcgacttcgcagcctatcgctccagagtgaagttcagcaggagcgcagacgcccccgcgtacaagcagggccagaaccagctctataacgagctcaatctaggacgaagagaggagtacgatgttttggacaagagacgtggccgggaccctgagatggggggaaagccgagaaggaagaaccctcaggaaggcctgtacaatgaactgcagaaagataagatggcggaggcctacagtgagattgggatgaaaggcgagcgccggaggggcaaggggcacgatggcctttaccagggtctcagtacagccaccaaggacacctacgacgcccttcacatgcaggccctgccccctcgctgataagtttaaactgccagaacatttctctggcctaactggccggtaccggcttcattttttccatttactgcagaggcttcattttttccatttactgcagaggcttcattttttccatttactgcagaactagttaggcgtgtacggtgggaggcctatataagcagagctcgtttagtgaaccgtcagatcgcctggagacgccatccacgctgttttgacctccatagaagacaccgggaccgatccagcctcgagagacccaatgctagccaccatggccttaccagtgaccgccttgctcctgccgctggccttgctgctccacgccgccaggccgtacttcggcaagctggaaagcaagctgagcgtgatccggaacctgaacgaccaggtgctgttcatcgatcagggcaacagacccctgttcgaggacatgaccgacagcgactgcagagacaacgcccctcggaccatcttcatcatcagcatgtacaaggacagccagcctagaggcatggccgtgaccatctctgtgaagtgcgagaagatcagcaccctgagctgcgagaacaagatcatcagcttcaaagagatgaacccgccggacaacatcaaggacaccaagagcgacatcatattcttccagcggagcgtgcccggccacgacaacaagatgcagtttgagagcagcagctacgagggctacttcctggcctgcgagaaagagcgggacctgttcaagctgatcctgaagaaagaggacgaactgggcgaccgcagcatcatgttcaccgtgcagaacgaggactgataa

SEQ ID NO: 1646 - DNA, 2296 bp, Artificial Sequence
  huMNC28283zFoxp3NFATIL18
atggccttaccagtgaccgccttgctcctgccgctggccttgctgctccacgccgccaggccggaggtgcagctggtggagtctgggggaggcctggtcaagcctggggggtccctgagactctcctgtgcagcctctggattcaccttcagtggctatgccatgagctgggtccgccaggctccagggaaggggctggagtgggtctcaaccattagtagtggcggaacctacatatactaccccgactcagtgaagggccgattcaccatctccagagacaacgccaagaactcactgtatctgcaaatgaacagcctgagagccgaggacacggccgtgtattactgtgcgagacttgggggggataattactacgaatacttcgatgtctggggcaaagggaccacggtcaccgtctcctccggcggtggcggatccggcggtggcggatccggcggtggcggatccgacattgtgctgacccagtctccagcctccttggccgtgtctccaggacagagggccaccatcacctgcagagccagtaagagtgtcagtaccagcggatactcctacatgcactggtatcagcagaaaccaggacaacctcctaaactcctgatttacctggcatccaatctggagagcggggtcccagccaggttcagcggcagtgggtctgggaccgatttcaccctcacaattaatcctgtggaagctaatgatactgcaaattattactgtcagcacagtagggagctgcctttcacattcggcggagggaccaaggtggagatcaaacgaactacaacaacccctgcccccagacctcctaccccagcccctacaattgccagccagcctctgagcctgaggcccgaggcttgtagacctgctgctggcggagccgtgcacaccagaggactggatttcgcctgcgacatctacatctgggcgcccttggccgggacttgtggggtccttctcctgtcactggttatcaccctttactgcaggagtaagaggagcaggctcctgcacagtgactacatgaacatgactcctagaagacctgggcctaccagaaagcattaccagccctatgccccaccacgcgacttcgcagcctatcgctccagagtgaagttcagcaggagcgcagacgcccccgcgtacaagcagggccagaaccagctctataacgagctcaatctaggacgaagagaggagtacgatgttttggacaagagacgtggccgggaccctgagatggggggaaagccgagaaggaagaaccctcaggaaggcctgtacaatgaactgcagaaagataagatggcggaggcctacagtgagattgggatgaaaggcgagcgccggaggggcaaggggcacgatggcctttaccagggtctcagtacagccaccaaggacacctacgacgcccttcacatgcaggccctgccccctcgctgataagtttaaactgccagaacatttctctggcctaactggccggtaccggcttcattttttccatttactgcagaggcttcattttttccatttactgcagaggcttcattttttccatttactgcagaactagttaggcgtgtacggtgggaggcctatataagcagagctcgtttagtgaaccgtcagatcgcctggagacgccatccacgctgttttgacctccatagaagacaccgggaccgatccagcctcgagagacccaatgctagccaccatggccttaccagtgaccgccttgctcctgccgctggccttgctgctccacgccgccaggccgtacttcggcaagctggaaagcaagctgagcgtgatccggaacctgaacgaccaggtgctgttcatcgatcagggcaacagacccctgttcgaggacatgaccgacagcgactgcagagacaacgcccctcggaccatcttcatcatcagcatgtacaaggacagccagcctagaggcatggccgtgaccatctctgtgaagtgcgagaagatcagcaccctgagctgcgagaacaagatcatcagcttcaaagagatgaacccgccggacaacatcaaggacaccaagagcgacatcatattcttccagcggagcgtgcccggccacgacaacaagatgcagtttgagagcagcagctacgagggctacttcctggcctgcgagaaagagcgggacctgttcaagctgatcctgaagaaagaggacgaactgggcgaccgcagcatcatgttcaccgtgcagaacgaggactgataa

SEQ ID NO: 1647 - DNA, 2347 bp, Artificial Sequence
  muMNC2841BB3z1XXFoxp3NFATIL18
atggccttaccagtgaccgccttgctcctgccgctggccttgctgctccacgccgccaggccggaggtccagctggaggagtcagggggaggcttagtgaagcctggagggtccctgaaactctcctgtgcagcctctggattcactttcagtggctatgccatgtcttgggttcgccagactccggagaagaggctggagtgggtcgcaaccattagtagtggtggtacttatatctactatccagacagtgtgaaggggcgattcaccatctccagagacaatgccaagaacaccctgtacctgcaaatgagcagtctgaggtctgaggacacggccatgtattactgtgcaagacttgggggggataattactacgaatacttcgatgtctggggcgcagggaccacggtcaccgtctcctccgccaaaacgacacccccatctgtctatggcggtggcggatccggcggtggcggatccggcggtggcggatccgacattgtgatcacacagtctacagcttccttaggtgtatctctggggcagagggccaccatctcatgcagggccagcaaaagtgtcagtacatctggctatagttatatgcactggtaccaacagagaccaggacagccacccaaactcctcatctatcttgcatccaacctagaatctggggtccctgccaggttcagtggcagtgggtctgggacagacttcaccctcaacatccatcctgtggaggaggaggatgctgcaacctattactgtcagcacagtagggagcttccgttcacgttcggaggggggaccaagctggagataaaacgggctgatgctgcaccaactgtatccacaacaacccctgcccccagacctcctaccccagcccctacaattgccagccagcctctgagcctgaggcccgaggcttgtagacctgctgctggcggagccgtgcacaccagaggactggatttcgcctgcgacatctacatctgggcgcccttggccgggacttgtggggtccttctcctgtcactggttatcaccctttactgcaaacggggcagaaagaaactcctgtatatattcaaacaaccatttatgagaccagtacaaactactcaagaggaagatggctgtagctgccgatttccagaagaagaagaaggaggatgtgaactgagagtgaagttcagcaggagcgcagacgcccccgcgtacaagcagggccagaaccagctctataacgagctcaatctaggacgaagagaggagtacgatgttttggacaagagacgtggccgggaccctgagatggggggaaagccgagaaggaagaaccctcaggaaggcctgttcaatgaactgcagaaagataagatggcggaggccttcagtgagattgggatgaaaggcgagcgccggaggggcaaggggcacgatggccttttccagggtctcagtacagccaccaaggacaccttcgacgcccttcacatgcaggccctgccccctcgctgataagtttaaactgccagaacatttctctggcctaactggccggtaccggcttcattttttccatttactgcagaggcttcattttttccatttactgcagaggcttcattttttccatttactgcagaactagttaggcgtgtacggtgggaggcctatataagcagagctcgtttagtgaaccgtcagatcgcctggagacgccatccacgctgttttgacctccatagaagacaccgggaccgatccagcctcgagagacccaatgctagccaccatggccttaccagtgaccgccttgctcctgccgctggccttgctgctccacgccgccaggccgtacttcggcaagctggaaagcaagctgagcgtgatccggaacctgaacgaccaggtgctgttcatcgatcagggcaacagacccctgttcgaggacatgaccgacagcgactgcagagacaacgcccctcggaccatcttcatcatcagcatgtacaaggacagccagcctagaggcatggccgtgaccatctctgtgaagtgcgagaagatcagcaccctgagctgcgagaacaagatcatcagcttcaaagagatgaacccgccggacaacatcaaggacaccaagagcgacatcatattcttccagcggagcgtgcccggccacgacaacaagatgcagtttgagagcagcagctacgagggctacttcctggcctgcgagaaagagcgggacctgttcaagctgatcctgaagaaagaggacgaactgggcgaccgcagcatcatgttcaccgtgcagaacgaggactgataa

SEQ ID NO: 1648 - DNA, 2299 bp, Artificial Sequence
  huMNC2841BB3z1XXFoxp3NFATIL18
atggccttaccagtgaccgccttgctcctgccgctggccttgctgctccacgccgccaggccggaggtgcagctggtggagtctgggggaggcctggtcaagcctggggggtccctgagactctcctgtgcagcctctggattcaccttcagtggctatgccatgagctgggtccgccaggctccagggaaggggctggagtgggtctcaaccattagtagtggcggaacctacatatactaccccgactcagtgaagggccgattcaccatctccagagacaacgccaagaactcactgtatctgcaaatgaacagcctgagagccgaggacacggccgtgtattactgtgcgagacttgggggggataattactacgaatacttcgatgtctggggcaaagggaccacggtcaccgtctcctccggcggtggcggatccggcggtggcggatccggcggtggcggatccgacattgtgctgacccagtctccagcctccttggccgtgtctccaggacagagggccaccatcacctgcagagccagtaagagtgtcagtaccagcggatactcctacatgcactggtatcagcagaaaccaggacaacctcctaaactcctgatttacctggcatccaatctggagagcggggtcccagccaggttcagcggcagtgggtctgggaccgatttcaccctcacaattaatcctgtggaagctaatgatactgcaaattattactgtcagcacagtagggagctgcctttcacattcggcggagggaccaaggtggagatcaaacgaactacaacaacccctgcccccagacctcctaccccagcccctacaattgccagccagcctctgagcctgaggcccgaggcttgtagacctgctgctggcggagccgtgcacaccagaggactggatttcgcctgcgacatctacatctgggcgcccttggccgggacttgtggggtccttctcctgtcactggttatcaccctttactgcaaacggggcagaaagaaactcctgtatatattcaaacaaccatttatgagaccagtacaaactactcaagaggaagatggctgtagctgccgatttccagaagaagaagaaggaggatgtgaactgagagtgaagttcagcaggagcgcagacgcccccgcgtacaagcagggccagaaccagctctataacgagctcaatctaggacgaagagaggagtacgatgttttggacaagagacgtggccgggaccctgagatggggggaaagccgagaaggaagaaccctcaggaaggcctgttcaatgaactgcagaaagataagatggcggaggccttcagtgagattgggatgaaaggcgagcgccggaggggcaaggggcacgatggccttttccagggtctcagtacagccaccaaggacaccttcgacgcccttcacatgcaggccctgccccctcgctgataagtttaaactgccagaacatttctctggcctaactggccggtaccggcttcattttttccatttactgcagaggcttcattttttccatttactgcagaggcttcattttttccatttactgcagaactagttaggcgtgtacggtgggaggcctatataagcagagctcgtttagtgaaccgtcagatcgcctggagacgccatccacgctgttttgacctccatagaagacaccgggaccgatccagcctcgagagacccaatgctagccaccatggccttaccagtgaccgccttgctcctgccgctggccttgctgctccacgccgccaggccgtacttcggcaagctggaaagcaagctgagcgtgatccggaacctgaacgaccaggtgctgttcatcgatcagggcaacagacccctgttcgaggacatgaccgacagcgactgcagagacaacgcccctcggaccatcttcatcatcagcatgtacaaggacagccagcctagaggcatggccgtgaccatctctgtgaagtgcgagaagatcagcaccctgagctgcgagaacaagatcatcagcttcaaagagatgaacccgccggacaacatcaaggacaccaagagcgacatcatattcttccagcggagcgtgcccggccacgacaacaagatgcagtttgagagcagcagctacgagggctacttcctggcctgcgagaaagagcgggacctgttcaagctgatcctgaagaaagaggacgaactgggcgaccgcagcatcatgttcaccgtgcagaacgaggactgataa

SEQ ID NO: 1649 - DNA, 2344 bp, Artificial Sequence
  muMNC28283z1XXFoxp3NFATIL18
atggccttaccagtgaccgccttgctcctgccgctggccttgctgctccacgccgccaggccggaggtccagctggaggagtcagggggaggcttagtgaagcctggagggtccctgaaactctcctgtgcagcctctggattcactttcagtggctatgccatgtcttgggttcgccagactccggagaagaggctggagtgggtcgcaaccattagtagtggtggtacttatatctactatccagacagtgtgaaggggcgattcaccatctccagagacaatgccaagaacaccctgtacctgcaaatgagcagtctgaggtctgaggacacggccatgtattactgtgcaagacttgggggggataattactacgaatacttcgatgtctggggcgcagggaccacggtcaccgtctcctccgccaaaacgacacccccatctgtctatggcggtggcggatccggcggtggcggatccggcggtggcggatccgacattgtgatcacacagtctacagcttccttaggtgtatctctggggcagagggccaccatctcatgcagggccagcaaaagtgtcagtacatctggctatagttatatgcactggtaccaacagagaccaggacagccacccaaactcctcatctatcttgcatccaacctagaatctggggtccctgccaggttcagtggcagtgggtctgggacagacttcaccctcaacatccatcctgtggaggaggaggatgctgcaacctattactgtcagcacagtagggagcttccgttcacgttcggaggggggaccaagctggagataaaacgggctgatgctgcaccaactgtatccacaacaacccctgcccccagacctcctaccccagcccctacaattgccagccagcctctgagcctgaggcccgaggcttgtagacctgctgctggcggagccgtgcacaccagaggactggatttcgcctgcgacatctacatctgggcgcccttggccgggacttgtggggtccttctcctgtcactggttatcaccctttactgcaggagtaagaggagcaggctcctgcacagtgactacatgaacatgactcctagaagacctgggcctaccagaaagcattaccagccctatgccccaccacgcgacttcgcagcctatcgctccagagtgaagttcagcaggagcgcagacgcccccgcgtacaagcagggccagaaccagctctataacgagctcaatctaggacgaagagaggagtacgatgttttggacaagagacgtggccgggaccctgagatggggggaaagccgagaaggaagaaccctcaggaaggcctgttcaatgaactgcagaaagataagatggcggaggccttcagtgagattgggatgaaaggcgagcgccggaggggcaaggggcacgatggccttttccagggtctcagtacagccaccaaggacaccttcgacgcccttcacatgcaggccctgccccctcgctgataagtttaaactgccagaacatttctctggcctaactggccggtaccggcttcattttttccatttactgcagaggcttcattttttccatttactgcagaggcttcattttttccatttactgcagaactagttaggcgtgtacggtgggaggcctatataagcagagctcgtttagtgaaccgtcagatcgcctggagacgccatccacgctgttttgacctccatagaagacaccgggaccgatccagcctcgagagacccaatgctagccaccatggccttaccagtgaccgccttgctcctgccgctggccttgctgctccacgccgccaggccgtacttcggcaagctggaaagcaagctgagcgtgatccggaacctgaacgaccaggtgctgttcatcgatcagggcaacagacccctgttcgaggacatgaccgacagcgactgcagagacaacgcccctcggaccatcttcatcatcagcatgtacaaggacagccagcctagaggcatggccgtgaccatctctgtgaagtgcgagaagatcagcaccctgagctgcgagaacaagatcatcagcttcaaagagatgaacccgccggacaacatcaaggacaccaagagcgacatcatattcttccagcggagcgtgcccggccacgacaacaagatgcagtttgagagcagcagctacgagggctacttcctggcctgcgagaaagagcgggacctgttcaagctgatcctgaagaaagaggacgaactgggcgaccgcagcatcatgttcaccgtgcagaacgaggactgataa

SEQ ID NO: 1650 - DNA, 2296 bp, Artificial Sequence
  huMNC28283z1XXFoxp3NFATIL18
atggccttaccagtgaccgccttgctcctgccgctggccttgctgctccacgccgccaggccggaggtgcagctggtggagtctgggggaggcctggtcaagcctggggggtccctgagactctcctgtgcagcctctggattcaccttcagtggctatgccatgagctgggtccgccaggctccagggaaggggctggagtgggtctcaaccattagtagtggcggaacctacatatactaccccgactcagtgaagggccgattcaccatctccagagacaacgccaagaactcactgtatctgcaaatgaacagcctgagagccgaggacacggccgtgtattactgtgcgagacttgggggggataattactacgaatacttcgatgtctggggcaaagggaccacggtcaccgtctcctccggcggtggcggatccggcggtggcggatccggcggtggcggatccgacattgtgctgacccagtctccagcctccttggccgtgtctccaggacagagggccaccatcacctgcagagccagtaagagtgtcagtaccagcggatactcctacatgcactggtatcagcagaaaccaggacaacctcctaaactcctgatttacctggcatccaatctggagagcggggtcccagccaggttcagcggcagtgggtctgggaccgatttcaccctcacaattaatcctgtggaagctaatgatactgcaaattattactgtcagcacagtagggagctgcctttcacattcggcggagggaccaaggtggagatcaaacgaactacaacaacccctgcccccagacctcctaccccagcccctacaattgccagccagcctctgagcctgaggcccgaggcttgtagacctgctgctggcggagccgtgcacaccagaggactggatttcgcctgcgacatctacatctgggcgcccttggccgggacttgtggggtccttctcctgtcactggttatcaccctttactgcaggagtaagaggagcaggctcctgcacagtgactacatgaacatgactcctagaagacctgggcctaccagaaagcattaccagccctatgccccaccacgcgacttcgcagcctatcgctccagagtgaagttcagcaggagcgcagacgcccccgcgtacaagcagggccagaaccagctctataacgagctcaatctaggacgaagagaggagtacgatgttttggacaagagacgtggccgggaccctgagatggggggaaagccgagaaggaagaaccctcaggaaggcctgttcaatgaactgcagaaagataagatggcggaggccttcagtgagattgggatgaaaggcgagcgccggaggggcaaggggcacgatggccttttccagggtctcagtacagccaccaaggacaccttcgacgcccttcacatgcaggccctgccccctcgctgataagtttaaactgccagaacatttctctggcctaactggccggtaccggcttcattttttccatttactgcagaggcttcattttttccatttactgcagaggcttcattttttccatttactgcagaactagttaggcgtgtacggtgggaggcctatataagcagagctcgtttagtgaaccgtcagatcgcctggagacgccatccacgctgttttgacctccatagaagacaccgggaccgatccagcctcgagagacccaatgctagccaccatggccttaccagtgaccgccttgctcctgccgctggccttgctgctccacgccgccaggccgtacttcggcaagctggaaagcaagctgagcgtgatccggaacctgaacgaccaggtgctgttcatcgatcagggcaacagacccctgttcgaggacatgaccgacagcgactgcagagacaacgcccctcggaccatcttcatcatcagcatgtacaaggacagccagcctagaggcatggccgtgaccatctctgtgaagtgcgagaagatcagcaccctgagctgcgagaacaagatcatcagcttcaaagagatgaacccgccggacaacatcaaggacaccaagagcgacatcatattcttccagcggagcgtgcccggccacgacaacaagatgcagtttgagagcagcagctacgagggctacttcctggcctgcgagaaagagcgggacctgttcaagctgatcctgaagaaagaggacgaactgggcgaccgcagcatcatgttcaccgtgcagaacgaggactgataa

SEQ ID NO: 1651 - DNA, 2281 bp, Artificial Sequence
  muMNE6841BB3zFoxp3NFATIL18
atggccttaccagtgaccgccttgctcctgccgctggccttgctgctccacgccgccaggccggaggtgaaggtggtggagtctgggggagacttagtgaagcctggagggtccctgaaactctcctgtgtagtctctggattcactttcagtagatatggcatgtcttgggttcgccagactccaggcaagaggctggagtgggtcgcaaccattagtggtggcggtacttacatctactatccagacagtgtgaaggggcgattcaccatctccagagacaatgccaagaacaccctgtacctgcaaatgagcagtctgaagtctgaggacacagccatgtatcactgtacaagggataactacggtaggaactacgactacggtatggactactggggtcaaggaacctcagtcaccgtctcctcaggcggtggcggatccggcggtggcggatccggcggtggcggatcccaaattgttctcacccagtctccagcaatcatgtctgcatctccaggggaggaggtcaccctaacctgcagtgccacctcaagtgtaagttacatacactggttccagcagaggccaggcacttctcccaaactctggatttatagcacatccaacctggcttctggagtccctgttcgcttcagtggcagtggatatgggacctcttactctctcacaatcagccgaatggaggctgaagatgctgccacttattactgccagcaaaggagtagttccccattcacgttcggctcggggacaaagttggaaataaaaacaacaacccctgcccccagacctcctaccccagcccctacaattgccagccagcctctgagcctgaggcccgaggcttgtagacctgctgctggcggagccgtgcacaccagaggactggatttcgcctgcgacatctacatctgggcgcccttggccgggacttgtggggtccttctcctgtcactggttatcaccctttactgcaaacggggcagaaagaaactcctgtatatattcaaacaaccatttatgagaccagtacaaactactcaagaggaagatggctgtagctgccgatttccagaagaagaagaaggaggatgtgaactgagagtgaagttcagcaggagcgcagacgcccccgcgtacaagcagggccagaaccagctctataacgagctcaatctaggacgaagagaggagtacgatgttttggacaagagacgtggccgggaccctgagatggggggaaagccgagaaggaagaaccctcaggaaggcctgtacaatgaactgcagaaagataagatggcggaggcctacagtgagattgggatgaaaggcgagcgccggaggggcaaggggcacgatggcctttaccagggtctcagtacagccaccaaggacacctacgacgcccttcacatgcaggccctgccccctcgctgataagtttaaactgccagaacatttctctggcctaactggccggtaccggcttcattttttccatttactgcagaggcttcattttttccatttactgcagaggcttcattttttccatttactgcagaactagttaggcgtgtacggtgggaggcctatataagcagagctcgtttagtgaaccgtcagatcgcctggagacgccatccacgctgttttgacctccatagaagacaccgggaccgatccagcctcgagagacccaatgctagccaccatggccttaccagtgaccgccttgctcctgccgctggccttgctgctccacgccgccaggccgtacttcggcaagctggaaagcaagctgagcgtgatccggaacctgaacgaccaggtgctgttcatcgatcagggcaacagacccctgttcgaggacatgaccgacagcgactgcagagacaacgcccctcggaccatcttcatcatcagcatgtacaaggacagccagcctagaggcatggccgtgaccatctctgtgaagtgcgagaagatcagcaccctgagctgcgagaacaagatcatcagcttcaaagagatgaacccgccggacaacatcaaggacaccaagagcgacatcatattcttccagcggagcgtgcccggccacgacaacaagatgcagtttgagagcagcagctacgagggctacttcctggcctgcgagaaagagcgggacctgttcaagctgatcctgaagaaagaggacgaactgggcgaccgcagcatcatgttcaccgtgcagaacgaggactgataa

SEQ ID NO: 1652 - DNA, 2281 bp, Artificial Sequence
  huMNE6841BB3zFoxp3NFATIL18
atggccttaccagtgaccgccttgctcctgccgctggccttgctgctccacgccgccaggccggaggtgcagctggtggagtctgggggaggcctggtcaagcctggggggtccctgagactctcctgtgcagcctctggattcaccttcagtaggtatggcatgagctgggtccgccaggctccagggaagaggctggagtgggtctcaaccattagtggcggaggcacctacatatactacccagactcagtgaagggccgattcaccatctccagagacaacgccaagaacaccctgtatctgcaaatgaacagcctgagagccgaggacacggctgtgtattactgtaccagagataactatggccgcaactatgattatggcatggattattggggccagggcaccctggtgaccgtgagcagcggcggtggcggatccggcggtggcggatccggcggtggcggatccgaaattgtgttgacacagtctccagccaccctgtctttgtctccaggggaaagagccaccctcacctgcagcgccaccagcagtgttagctacatccactggtaccaacagaggcctggccagagccccaggctcctcatctatagcacctccaacctggccagcggcatcccagccaggttcagtggcagtgggtctgggagcgactacactctcaccatcagcagcctagagcctgaagattttgcagtttattactgtcagcagcgtagcagctcccctttcacctttggcagcggcaccaaagtggaaattaaaacaacaacccctgcccccagacctcctaccccagcccctacaattgccagccagcctctgagcctgaggcccgaggcttgtagacctgctgctggcggagccgtgcacaccagaggactggatttcgcctgcgacatctacatctgggcgcccttggccgggacttgtggggtccttctcctgtcactggttatcaccctttactgcaaacggggcagaaagaaactcctgtatatattcaaacaaccatttatgagaccagtacaaactactcaagaggaagatggctgtagctgccgatttccagaagaagaagaaggaggatgtgaactgagagtgaagttcagcaggagcgcagacgcccccgcgtacaagcagggccagaaccagctctataacgagctcaatctaggacgaagagaggagtacgatgttttggacaagagacgtggccgggaccctgagatggggggaaagccgagaaggaagaaccctcaggaaggcctgtacaatgaactgcagaaagataagatggcggaggcctacagtgagattgggatgaaaggcgagcgccggaggggcaaggggcacgatggcctttaccagggtctcagtacagccaccaaggacacctacgacgcccttcacatgcaggccctgccccctcgctgataagtttaaactgccagaacatttctctggcctaactggccggtaccggcttcattttttccatttactgcagaggcttcattttttccatttactgcagaggcttcattttttccatttactgcagaactagttaggcgtgtacggtgggaggcctatataagcagagctcgtttagtgaaccgtcagatcgcctggagacgccatccacgctgttttgacctccatagaagacaccgggaccgatccagcctcgagagacccaatgctagccaccatggccttaccagtgaccgccttgctcctgccgctggccttgctgctccacgccgccaggccgtacttcggcaagctggaaagcaagctgagcgtgatccggaacctgaacgaccaggtgctgttcatcgatcagggcaacagacccctgttcgaggacatgaccgacagcgactgcagagacaacgcccctcggaccatcttcatcatcagcatgtacaaggacagccagcctagaggcatggccgtgaccatctctgtgaagtgcgagaagatcagcaccctgagctgcgagaacaagatcatcagcttcaaagagatgaacccgccggacaacatcaaggacaccaagagcgacatcatattcttccagcggagcgtgcccggccacgacaacaagatgcagtttgagagcagcagctacgagggctacttcctggcctgcgagaaagagcgggacctgttcaagctgatcctgaagaaagaggacgaactgggcgaccgcagcatcatgttcaccgtgcagaacgaggactgataa

SEQ ID NO: 1653 - DNA, 2278 bp, Artificial Sequence
  muMNE684283zFoxp3NFATIL18
atggccttaccagtgaccgccttgctcctgccgctggccttgctgctccacgccgccaggccggaggtgaaggtggtggagtctgggggagacttagtgaagcctggagggtccctgaaactctcctgtgtagtctctggattcactttcagtagatatggcatgtcttgggttcgccagactccaggcaagaggctggagtgggtcgcaaccattagtggtggcggtacttacatctactatccagacagtgtgaaggggcgattcaccatctccagagacaatgccaagaacaccctgtacctgcaaatgagcagtctgaagtctgaggacacagccatgtatcactgtacaagggataactacggtaggaactacgactacggtatggactactggggtcaaggaacctcagtcaccgtctcctcaggcggtggcggatccggcggtggcggatccggcggtggcggatcccaaattgttctcacccagtctccagcaatcatgtctgcatctccaggggaggaggtcaccctaacctgcagtgccacctcaagtgtaagttacatacactggttccagcagaggccaggcacttctcccaaactctggatttatagcacatccaacctggcttctggagtccctgttcgcttcagtggcagtggatatgggacctcttactctctcacaatcagccgaatggaggctgaagatgctgccacttattactgccagcaaaggagtagttccccattcacgttcggctcggggacaaagttggaaataaaaacaacaacccctgcccccagacctcctaccccagcccctacaattgccagccagcctctgagcctgaggcccgaggcttgtagacctgctgctggcggagccgtgcacaccagaggactggatttcgcctgcgacatctacatctgggcgcccttggccgggacttgtggggtccttctcctgtcactggttatcaccctttactgcaggagtaagaggagcaggctcctgcacagtgactacatgaacatgactcctagaagacctgggcctaccagaaagcattaccagccctatgccccaccacgcgacttcgcagcctatcgctccagagtgaagttcagcaggagcgcagacgcccccgcgtacaagcagggccagaaccagctctataacgagctcaatctaggacgaagagaggagtacgatgttttggacaagagacgtggccgggaccctgagatggggggaaagccgagaaggaagaaccctcaggaaggcctgtacaatgaactgcagaaagataagatggcggaggcctacagtgagattgggatgaaaggcgagcgccggaggggcaaggggcacgatggcctttaccagggtctcagtacagccaccaaggacacctacgacgcccttcacatgcaggccctgccccctcgctgataagtttaaactgccagaacatttctctggcctaactggccggtaccggcttcattttttccatttactgcagaggcttcattttttccatttactgcagaggcttcattttttccatttactgcagaactagttaggcgtgtacggtgggaggcctatataagcagagctcgtttagtgaaccgtcagatcgcctggagacgccatccacgctgttttgacctccatagaagacaccgggaccgatccagcctcgagagacccaatgctagccaccatggccttaccagtgaccgccttgctcctgccgctggccttgctgctccacgccgccaggccgtacttcggcaagctggaaagcaagctgagcgtgatccggaacctgaacgaccaggtgctgttcatcgatcagggcaacagacccctgttcgaggacatgaccgacagcgactgcagagacaacgcccctcggaccatcttcatcatcagcatgtacaaggacagccagcctagaggcatggccgtgaccatctctgtgaagtgcgagaagatcagcaccctgagctgcgagaacaagatcatcagcttcaaagagatgaacccgccggacaacatcaaggacaccaagagcgacatcatattcttccagcggagcgtgcccggccacgacaacaagatgcagtttgagagcagcagctacgagggctacttcctggcctgcgagaaagagcgggacctgttcaagctgatcctgaagaaagaggacgaactgggcgaccgcagcatcatgttcaccgtgcagaacgaggactgataa

SEQ ID NO: 1654 - DNA, 2278 bp, Artificial Sequence
  huMNE68283zFoxp3NFATIL18
atggccttaccagtgaccgccttgctcctgccgctggccttgctgctccacgccgccaggccggaggtgcagctggtggagtctgggggaggcctggtcaagcctggggggtccctgagactctcctgtgcagcctctggattcaccttcagtaggtatggcatgagctgggtccgccaggctccagggaagaggctggagtgggtctcaaccattagtggcggaggcacctacatatactacccagactcagtgaagggccgattcaccatctccagagacaacgccaagaacaccctgtatctgcaaatgaacagcctgagagccgaggacacggctgtgtattactgtaccagagataactatggccgcaactatgattatggcatggattattggggccagggcaccctggtgaccgtgagcagcggcggtggcggatccggcggtggcggatccggcggtggcggatccgaaattgtgttgacacagtctccagccaccctgtctttgtctccaggggaaagagccaccctcacctgcagcgccaccagcagtgttagctacatccactggtaccaacagaggcctggccagagccccaggctcctcatctatagcacctccaacctggccagcggcatcccagccaggttcagtggcagtgggtctgggagcgactacactctcaccatcagcagcctagagcctgaagattttgcagtttattactgtcagcagcgtagcagctcccctttcacctttggcagcggcaccaaagtggaaattaaaacaacaacccctgcccccagacctcctaccccagcccctacaattgccagccagcctctgagcctgaggcccgaggcttgtagacctgctgctggcggagccgtgcacaccagaggactggatttcgcctgcgacatctacatctgggcgcccttggccgggacttgtggggtccttctcctgtcactggttatcaccctttactgcaggagtaagaggagcaggctcctgcacagtgactacatgaacatgactcctagaagacctgggcctaccagaaagcattaccagccctatgccccaccacgcgacttcgcagcctatcgctccagagtgaagttcagcaggagcgcagacgcccccgcgtacaagcagggccagaaccagctctataacgagctcaatctaggacgaagagaggagtacgatgttttggacaagagacgtggccgggaccctgagatggggggaaagccgagaaggaagaaccctcaggaaggcctgtacaatgaactgcagaaagataagatggcggaggcctacagtgagattgggatgaaaggcgagcgccggaggggcaaggggcacgatggcctttaccagggtctcagtacagccaccaaggacacctacgacgcccttcacatgcaggccctgccccctcgctgataagtttaaactgccagaacatttctctggcctaactggccggtaccggcttcattttttccatttactgcagaggcttcattttttccatttactgcagaggcttcattttttccatttactgcagaactagttaggcgtgtacggtgggaggcctatataagcagagctcgtttagtgaaccgtcagatcgcctggagacgccatccacgctgttttgacctccatagaagacaccgggaccgatccagcctcgagagacccaatgctagccaccatggccttaccagtgaccgccttgctcctgccgctggccttgctgctccacgccgccaggccgtacttcggcaagctggaaagcaagctgagcgtgatccggaacctgaacgaccaggtgctgttcatcgatcagggcaacagacccctgttcgaggacatgaccgacagcgactgcagagacaacgcccctcggaccatcttcatcatcagcatgtacaaggacagccagcctagaggcatggccgtgaccatctctgtgaagtgcgagaagatcagcaccctgagctgcgagaacaagatcatcagcttcaaagagatgaacccgccggacaacatcaaggacaccaagagcgacatcatattcttccagcggagcgtgcccggccacgacaacaagatgcagtttgagagcagcagctacgagggctacttcctggcctgcgagaaagagcgggacctgttcaagctgatcctgaagaaagaggacgaactgggcgaccgcagcatcatgttcaccgtgcagaacgaggactgataa

SEQ ID NO: 1655 - DNA, 2281 bp, Artificial Sequence
  muMNE6841BB3z1XXFoxp3NFATIL18
atggccttaccagtgaccgccttgctcctgccgctggccttgctgctccacgccgccaggccggaggtgaaggtggtggagtctgggggagacttagtgaagcctggagggtccctgaaactctcctgtgtagtctctggattcactttcagtagatatggcatgtcttgggttcgccagactccaggcaagaggctggagtgggtcgcaaccattagtggtggcggtacttacatctactatccagacagtgtgaaggggcgattcaccatctccagagacaatgccaagaacaccctgtacctgcaaatgagcagtctgaagtctgaggacacagccatgtatcactgtacaagggataactacggtaggaactacgactacggtatggactactggggtcaaggaacctcagtcaccgtctcctcaggcggtggcggatccggcggtggcggatccggcggtggcggatcccaaattgttctcacccagtctccagcaatcatgtctgcatctccaggggaggaggtcaccctaacctgcagtgccacctcaagtgtaagttacatacactggttccagcagaggccaggcacttctcccaaactctggatttatagcacatccaacctggcttctggagtccctgttcgcttcagtggcagtggatatgggacctcttactctctcacaatcagccgaatggaggctgaagatgctgccacttattactgccagcaaaggagtagttccccattcacgttcggctcggggacaaagttggaaataaaaacaacaacccctgcccccagacctcctaccccagcccctacaattgccagccagcctctgagcctgaggcccgaggcttgtagacctgctgctggcggagccgtgcacaccagaggactggatttcgcctgcgacatctacatctgggcgcccttggccgggacttgtggggtccttctcctgtcactggttatcaccctttactgcaaacggggcagaaagaaactcctgtatatattcaaacaaccatttatgagaccagtacaaactactcaagaggaagatggctgtagctgccgatttccagaagaagaagaaggaggatgtgaactgagagtgaagttcagcaggagcgcagacgcccccgcgtacaagcagggccagaaccagctctataacgagctcaatctaggacgaagagaggagtacgatgttttggacaagagacgtggccgggaccctgagatggggggaaagccgagaaggaagaaccctcaggaaggcctgttcaatgaactgcagaaagataagatggcggaggccttcagtgagattgggatgaaaggcgagcgccggaggggcaaggggcacgatggccttttccagggtctcagtacagccaccaaggacaccttcgacgcccttcacatgcaggccctgccccctcgctgataagtttaaactgccagaacatttctctggcctaactggccggtaccggcttcattttttccatttactgcagaggcttcattttttccatttactgcagaggcttcattttttccatttactgcagaactagttaggcgtgtacggtgggaggcctatataagcagagctcgtttagtgaaccgtcagatcgcctggagacgccatccacgctgttttgacctccatagaagacaccgggaccgatccagcctcgagagacccaatgctagccaccatggccttaccagtgaccgccttgctcctgccgctggccttgctgctccacgccgccaggccgtacttcggcaagctggaaagcaagctgagcgtgatccggaacctgaacgaccaggtgctgttcatcgatcagggcaacagacccctgttcgaggacatgaccgacagcgactgcagagacaacgcccctcggaccatcttcatcatcagcatgtacaaggacagccagcctagaggcatggccgtgaccatctctgtgaagtgcgagaagatcagcaccctgagctgcgagaacaagatcatcagcttcaaagagatgaacccgccggacaacatcaaggacaccaagagcgacatcatattcttccagcggagcgtgcccggccacgacaacaagatgcagtttgagagcagcagctacgagggctacttcctggcctgcgagaaagagcgggacctgttcaagctgatcctgaagaaagaggacgaactgggcgaccgcagcatcatgttcaccgtgcagaacgaggactgataa

SEQ ID NO: 1656 - DNA, 2281 bp, Artificial Sequence
  huMNE6841BB3z1XXFoxp3NFATIL18
atggccttaccagtgaccgccttgctcctgccgctggccttgctgctccacgccgccaggccggaggtgcagctggtggagtctgggggaggcctggtcaagcctggggggtccctgagactctcctgtgcagcctctggattcaccttcagtaggtatggcatgagctgggtccgccaggctccagggaagaggctggagtgggtctcaaccattagtggcggaggcacctacatatactacccagactcagtgaagggccgattcaccatctccagagacaacgccaagaacaccctgtatctgcaaatgaacagcctgagagccgaggacacggctgtgtattactgtaccagagataactatggccgcaactatgattatggcatggattattggggccagggcaccctggtgaccgtgagcagcggcggtggcggatccggcggtggcggatccggcggtggcggatccgaaattgtgttgacacagtctccagccaccctgtctttgtctccaggggaaagagccaccctcacctgcagcgccaccagcagtgttagctacatccactggtaccaacagaggcctggccagagccccaggctcctcatctatagcacctccaacctggccagcggcatcccagccaggttcagtggcagtgggtctgggagcgactacactctcaccatcagcagcctagagcctgaagattttgcagtttattactgtcagcagcgtagcagctcccctttcacctttggcagcggcaccaaagtggaaattaaaacaacaacccctgcccccagacctcctaccccagcccctacaattgccagccagcctctgagcctgaggcccgaggcttgtagacctgctgctggcggagccgtgcacaccagaggactggatttcgcctgcgacatctacatctgggcgcccttggccgggacttgtggggtccttctcctgtcactggttatcaccctttactgcaaacggggcagaaagaaactcctgtatatattcaaacaaccatttatgagaccagtacaaactactcaagaggaagatggctgtagctgccgatttccagaagaagaagaaggaggatgtgaactgagagtgaagttcagcaggagcgcagacgcccccgcgtacaagcagggccagaaccagctctataacgagctcaatctaggacgaagagaggagtacgatgttttggacaagagacgtggccgggaccctgagatggggggaaagccgagaaggaagaaccctcaggaaggcctgttcaatgaactgcagaaagataagatggcggaggccttcagtgagattgggatgaaaggcgagcgccggaggggcaaggggcacgatggccttttccagggtctcagtacagccaccaaggacaccttcgacgcccttcacatgcaggccctgccccctcgctgataagtttaaactgccagaacatttctctggcctaactggccggtaccggcttcattttttccatttactgcagaggcttcattttttccatttactgcagaggcttcattttttccatttactgcagaactagttaggcgtgtacggtgggaggcctatataagcagagctcgtttagtgaaccgtcagatcgcctggagacgccatccacgctgttttgacctccatagaagacaccgggaccgatccagcctcgagagacccaatgctagccaccatggccttaccagtgaccgccttgctcctgccgctggccttgctgctccacgccgccaggccgtacttcggcaagctggaaagcaagctgagcgtgatccggaacctgaacgaccaggtgctgttcatcgatcagggcaacagacccctgttcgaggacatgaccgacagcgactgcagagacaacgcccctcggaccatcttcatcatcagcatgtacaaggacagccagcctagaggcatggccgtgaccatctctgtgaagtgcgagaagatcagcaccctgagctgcgagaacaagatcatcagcttcaaagagatgaacccgccggacaacatcaaggacaccaagagcgacatcatattcttccagcggagcgtgcccggccacgacaacaagatgcagtttgagagcagcagctacgagggctacttcctggcctgcgagaaagagcgggacctgttcaagctgatcctgaagaaagaggacgaactgggcgaccgcagcatcatgttcaccgtgcagaacgaggactgataa

SEQ ID NO: 1657 - DNA, 2278 bp, Artificial Sequence
  muMNE68283z1XXFoxp3NFATIL18
atggccttaccagtgaccgccttgctcctgccgctggccttgctgctccacgccgccaggccggaggtgaaggtggtggagtctgggggagacttagtgaagcctggagggtccctgaaactctcctgtgtagtctctggattcactttcagtagatatggcatgtcttgggttcgccagactccaggcaagaggctggagtgggtcgcaaccattagtggtggcggtacttacatctactatccagacagtgtgaaggggcgattcaccatctccagagacaatgccaagaacaccctgtacctgcaaatgagcagtctgaagtctgaggacacagccatgtatcactgtacaagggataactacggtaggaactacgactacggtatggactactggggtcaaggaacctcagtcaccgtctcctcaggcggtggcggatccggcggtggcggatccggcggtggcggatcccaaattgttctcacccagtctccagcaatcatgtctgcatctccaggggaggaggtcaccctaacctgcagtgccacctcaagtgtaagttacatacactggttccagcagaggccaggcacttctcccaaactctggatttatagcacatccaacctggcttctggagtccctgttcgcttcagtggcagtggatatgggacctcttactctctcacaatcagccgaatggaggctgaagatgctgccacttattactgccagcaaaggagtagttccccattcacgttcggctcggggacaaagttggaaataaaaacaacaacccctgcccccagacctcctaccccagcccctacaattgccagccagcctctgagcctgaggcccgaggcttgtagacctgctgctggcggagccgtgcacaccagaggactggatttcgcctgcgacatctacatctgggcgcccttggccgggacttgtggggtccttctcctgtcactggttatcaccctttactgcaggagtaagaggagcaggctcctgcacagtgactacatgaacatgactcctagaagacctgggcctaccagaaagcattaccagccctatgccccaccacgcgacttcgcagcctatcgctccagagtgaagttcagcaggagcgcagacgcccccgcgtacaagcagggccagaaccagctctataacgagctcaatctaggacgaagagaggagtacgatgttttggacaagagacgtggccgggaccctgagatggggggaaagccgagaaggaagaaccctcaggaaggcctgttcaatgaactgcagaaagataagatggcggaggccttcagtgagattgggatgaaaggcgagcgccggaggggcaaggggcacgatggccttttccagggtctcagtacagccaccaaggacaccttcgacgcccttcacatgcaggccctgccccctcgctgataagtttaaactgccagaacatttctctggcctaactggccggtaccggcttcattttttccatttactgcagaggcttcattttttccatttactgcagaggcttcattttttccatttactgcagaactagttaggcgtgtacggtgggaggcctatataagcagagctcgtttagtgaaccgtcagatcgcctggagacgccatccacgctgttttgacctccatagaagacaccgggaccgatccagcctcgagagacccaatgctagccaccatggccttaccagtgaccgccttgctcctgccgctggccttgctgctccacgccgccaggccgtacttcggcaagctggaaagcaagctgagcgtgatccggaacctgaacgaccaggtgctgttcatcgatcagggcaacagacccctgttcgaggacatgaccgacagcgactgcagagacaacgcccctcggaccatcttcatcatcagcatgtacaaggacagccagcctagaggcatggccgtgaccatctctgtgaagtgcgagaagatcagcaccctgagctgcgagaacaagatcatcagcttcaaagagatgaacccgccggacaacatcaaggacaccaagagcgacatcatattcttccagcggagcgtgcccggccacgacaacaagatgcagtttgagagcagcagctacgagggctacttcctggcctgcgagaaagagcgggacctgttcaagctgatcctgaagaaagaggacgaactgggcgaccgcagcatcatgttcaccgtgcagaacgaggactgataa

SEQ ID NO: 1658 - DNA, 2278 bp, Artificial Sequence
  huMNE68283z1XXFoxp3NFATIL18
atggccttaccagtgaccgccttgctcctgccgctggccttgctgctccacgccgccaggccggaggtgcagctggtggagtctgggggaggcctggtcaagcctggggggtccctgagactctcctgtgcagcctctggattcaccttcagtaggtatggcatgagctgggtccgccaggctccagggaagaggctggagtgggtctcaaccattagtggcggaggcacctacatatactacccagactcagtgaagggccgattcaccatctccagagacaacgccaagaacaccctgtatctgcaaatgaacagcctgagagccgaggacacggctgtgtattactgtaccagagataactatggccgcaactatgattatggcatggattattggggccagggcaccctggtgaccgtgagcagcggcggtggcggatccggcggtggcggatccggcggtggcggatccgaaattgtgttgacacagtctccagccaccctgtctttgtctccaggggaaagagccaccctcacctgcagcgccaccagcagtgttagctacatccactggtaccaacagaggcctggccagagccccaggctcctcatctatagcacctccaacctggccagcggcatcccagccaggttcagtggcagtgggtctgggagcgactacactctcaccatcagcagcctagagcctgaagattttgcagtttattactgtcagcagcgtagcagctcccctttcacctttggcagcggcaccaaagtggaaattaaaacaacaacccctgcccccagacctcctaccccagcccctacaattgccagccagcctctgagcctgaggcccgaggcttgtagacctgctgctggcggagccgtgcacaccagaggactggatttcgcctgcgacatctacatctgggcgcccttggccgggacttgtggggtccttctcctgtcactggttatcaccctttactgcaggagtaagaggagcaggctcctgcacagtgactacatgaacatgactcctagaagacctgggcctaccagaaagcattaccagccctatgccccaccacgcgacttcgcagcctatcgctccagagtgaagttcagcaggagcgcagacgcccccgcgtacaagcagggccagaaccagctctataacgagctcaatctaggacgaagagaggagtacgatgttttggacaagagacgtggccgggaccctgagatggggggaaagccgagaaggaagaaccctcaggaaggcctgttcaatgaactgcagaaagataagatggcggaggccttcagtgagattgggatgaaaggcgagcgccggaggggcaaggggcacgatggccttttccagggtctcagtacagccaccaaggacaccttcgacgcccttcacatgcaggccctgccccctcgctgataagtttaaactgccagaacatttctctggcctaactggccggtaccggcttcattttttccatttactgcagaggcttcattttttccatttactgcagaggcttcattttttccatttactgcagaactagttaggcgtgtacggtgggaggcctatataagcagagctcgtttagtgaaccgtcagatcgcctggagacgccatccacgctgttttgacctccatagaagacaccgggaccgatccagcctcgagagacccaatgctagccaccatggccttaccagtgaccgccttgctcctgccgctggccttgctgctccacgccgccaggccgtacttcggcaagctggaaagcaagctgagcgtgatccggaacctgaacgaccaggtgctgttcatcgatcagggcaacagacccctgttcgaggacatgaccgacagcgactgcagagacaacgcccctcggaccatcttcatcatcagcatgtacaaggacagccagcctagaggcatggccgtgaccatctctgtgaagtgcgagaagatcagcaccctgagctgcgagaacaagatcatcagcttcaaagagatgaacccgccggacaacatcaaggacaccaagagcgacatcatattcttccagcggagcgtgcccggccacgacaacaagatgcagtttgagagcagcagctacgagggctacttcctggcctgcgagaaagagcgggacctgttcaagctgatcctgaagaaagaggacgaactgggcgaccgcagcatcatgttcaccgtgcagaacgaggactgataa

SEQ ID NO: 1659 - DNA, 2293 bp, Artificial Sequence
  mu20A10841BB3zFoxp3NFATIL18
atggccttaccagtgaccgccttgctcctgccgctggccttgctgctccacgccgccaggccggaagtgatgctggtggaatctggcggcggactggttaagcctggcggatctctgaagctgagctgtgccgccagcggcttcacctttagcacatacgccatgagctggatccggcagacccctgagaagagactggaatgggttgccagcatcggcagagccggcagcacctactacagcgattctgtgaagggcagattcaccatcagccgggacaacgtgcggaacatcctgtacctgcagatgagcagcctgcggagcgaggataccgccatgtactactgtgccagaggacccatctacaacgactacgacgagttcgcctattggggccagggcacactggttacagtttctgctggtggcggaggatctggcggaggtggaagcggcggaggcggatccaatatcatgatgacacagagcccgagcagcctggctgtgtctgctggcgagaaagtgaccatgtcctgcaagagcagccagagcgtgctgtactccagcaaccagaagaactacctggcctggtatcagcagaagcccggccagtctcctaagctgctgatctactgggccagcaccagagaaagcggcgtgcccgatagattcacaggcagcggcagcggaaccgacttcaccctgacaatcagctctgtgcaggccgaagatctggccgtgtactattgccaccagtacctgtccagcctgacctttggcgccggaacaaagctggaactgaagacaacaacccctgcccccagacctcctaccccagcccctacaattgccagccagcctctgagcctgaggcccgaggcttgtagacctgctgctggcggagccgtgcacaccagaggactggatttcgcctgcgacatctacatctgggcgcccttggccgggacttgtggggtccttctcctgtcactggttatcaccctttactgcaaacggggcagaaagaaactcctgtatatattcaaacaaccatttatgagaccagtacaaactactcaagaggaagatggctgtagctgccgatttccagaagaagaagaaggaggatgtgaactgagagtgaagttcagcaggagcgcagacgcccccgcgtacaagcagggccagaaccagctctataacgagctcaatctaggacgaagagaggagtacgatgttttggacaagagacgtggccgggaccctgagatggggggaaagccgagaaggaagaaccctcaggaaggcctgtacaatgaactgcagaaagataagatggcggaggcctacagtgagattgggatgaaaggcgagcgccggaggggcaaggggcacgatggcctttaccagggtctcagtacagccaccaaggacacctacgacgcccttcacatgcaggccctgccccctcgctgataagtttaaactgccagaacatttctctggcctaactggccggtaccggcttcattttttccatttactgcagaggcttcattttttccatttactgcagaggcttcattttttccatttactgcagaactagttaggcgtgtacggtgggaggcctatataagcagagctcgtttagtgaaccgtcagatcgcctggagacgccatccacgctgttttgacctccatagaagacaccgggaccgatccagcctcgagagacccaatgctagccaccatggccttaccagtgaccgccttgctcctgccgctggccttgctgctccacgccgccaggccgtacttcggcaagctggaaagcaagctgagcgtgatccggaacctgaacgaccaggtgctgttcatcgatcagggcaacagacccctgttcgaggacatgaccgacagcgactgcagagacaacgcccctcggaccatcttcatcatcagcatgtacaaggacagccagcctagaggcatggccgtgaccatctctgtgaagtgcgagaagatcagcaccctgagctgcgagaacaagatcatcagcttcaaagagatgaacccgccggacaacatcaaggacaccaagagcgacatcatattcttccagcggagcgtgcccggccacgacaacaagatgcagtttgagagcagcagctacgagggctacttcctggcctgcgagaaagagcgggacctgttcaagctgatcctgaagaaagaggacgaactgggcgaccgcagcatcatgttcaccgtgcagaacgaggactgataa

SEQ ID NO: 1660 - DNA, 2296 bp, Artificial Sequence
  hu20A10841BB3zFoxp3NFATIL18
atggccttaccagtgaccgccttgctcctgccgctggccttgctgctccacgccgccaggccggaggtgcagctggttgaatctggcggcggacttgtgaagcctggcggatctctgagactgagctgtgccgccagcggcttcacctttagcacatacgccatgagctgggtccgacaggcccctggaaaaggccttgaatgggttgcctctatcggcagagccggcagcacctactacagcgattctgtgaagggcagattcaccatcagccgggacaacgccaagaacagcctgtacctgcagatgaactccctgagagccgaggacaccgccgtgtactattgtgccagaggacccatctacaacgactacgacgagttcgcctattggggccagggcacactggtcacagtcagctctggcggtggcggaagcggaggcggtggctccggtggcggaggcagcgacattgtgctgacccagtctccagcctccttggccgtgtctccaggacagagggccaccatcacctgcaagagcagccagagcgtgctgtactccagcaaccagaagaactacctggcctggtatcagcagaaaccaggacaacctcctaaactcctgatttactgggccagcaccagagaaagcggggtcccagccaggttcagcggcagtgggtctgggaccgatttcaccctcacaattaatcctgtggaagctaatgatactgcaaattattactgtcaccagtacctgagcagcctgaccttcggcggagggaccaaggtggagatcaaacgaacaacaacccctgcccccagacctcctaccccagcccctacaattgccagccagcctctgagcctgaggcccgaggcttgtagacctgctgctggcggagccgtgcacaccagaggactggatttcgcctgcgacatctacatctgggcgcccttggccgggacttgtggggtccttctcctgtcactggttatcaccctttactgcaaacggggcagaaagaaactcctgtatatattcaaacaaccatttatgagaccagtacaaactactcaagaggaagatggctgtagctgccgatttccagaagaagaagaaggaggatgtgaactgagagtgaagttcagcaggagcgcagacgcccccgcgtacaagcagggccagaaccagctctataacgagctcaatctaggacgaagagaggagtacgatgttttggacaagagacgtggccgggaccctgagatggggggaaagccgagaaggaagaaccctcaggaaggcctgtacaatgaactgcagaaagataagatggcggaggcctacagtgagattgggatgaaaggcgagcgccggaggggcaaggggcacgatggcctttaccagggtctcagtacagccaccaaggacacctacgacgcccttcacatgcaggccctgccccctcgctgataagtttaaactgccagaacatttctctggcctaactggccggtaccggcttcattttttccatttactgcagaggcttcattttttccatttactgcagaggcttcattttttccatttactgcagaactagttaggcgtgtacggtgggaggcctatataagcagagctcgtttagtgaaccgtcagatcgcctggagacgccatccacgctgttttgacctccatagaagacaccgggaccgatccagcctcgagagacccaatgctagccaccatggccttaccagtgaccgccttgctcctgccgctggccttgctgctccacgccgccaggccgtacttcggcaagctggaaagcaagctgagcgtgatccggaacctgaacgaccaggtgctgttcatcgatcagggcaacagacccctgttcgaggacatgaccgacagcgactgcagagacaacgcccctcggaccatcttcatcatcagcatgtacaaggacagccagcctagaggcatggccgtgaccatctctgtgaagtgcgagaagatcagcaccctgagctgcgagaacaagatcatcagcttcaaagagatgaacccgccggacaacatcaaggacaccaagagcgacatcatattcttccagcggagcgtgcccggccacgacaacaagatgcagtttgagagcagcagctacgagggctacttcctggcctgcgagaaagagcgggacctgttcaagctgatcctgaagaaagaggacgaactgggcgaccgcagcatcatgttcaccgtgcagaacgaggactgataa

SEQ ID NO: 1661 - DNA, 2290 bp, Artificial Sequence
  mu20A108283zFoxp3NFATIL18
atggccttaccagtgaccgccttgctcctgccgctggccttgctgctccacgccgccaggccggaagtgatgctggtggaatctggcggcggactggttaagcctggcggatctctgaagctgagctgtgccgccagcggcttcacctttagcacatacgccatgagctggatccggcagacccctgagaagagactggaatgggttgccagcatcggcagagccggcagcacctactacagcgattctgtgaagggcagattcaccatcagccgggacaacgtgcggaacatcctgtacctgcagatgagcagcctgcggagcgaggataccgccatgtactactgtgccagaggacccatctacaacgactacgacgagttcgcctattggggccagggcacactggttacagtttctgctggtggcggaggatctggcggaggtggaagcggcggaggcggatccaatatcatgatgacacagagcccgagcagcctggctgtgtctgctggcgagaaagtgaccatgtcctgcaagagcagccagagcgtgctgtactccagcaaccagaagaactacctggcctggtatcagcagaagcccggccagtctcctaagctgctgatctactgggccagcaccagagaaagcggcgtgcccgatagattcacaggcagcggcagcggaaccgacttcaccctgacaatcagctctgtgcaggccgaagatctggccgtgtactattgccaccagtacctgtccagcctgacctttggcgccggaacaaagctggaactgaagacaacaacccctgcccccagacctcctaccccagcccctacaattgccagccagcctctgagcctgaggcccgaggcttgtagacctgctgctggcggagccgtgcacaccagaggactggatttcgcctgcgacatctacatctgggcgcccttggccgggacttgtggggtccttctcctgtcactggttatcaccctttactgcaggagtaagaggagcaggctcctgcacagtgactacatgaacatgactcctagaagacctgggcctaccagaaagcattaccagccctatgccccaccacgcgacttcgcagcctatcgctccagagtgaagttcagcaggagcgcagacgcccccgcgtacaagcagggccagaaccagctctataacgagctcaatctaggacgaagagaggagtacgatgttttggacaagagacgtggccgggaccctgagatggggggaaagccgagaaggaagaaccctcaggaaggcctgtacaatgaactgcagaaagataagatggcggaggcctacagtgagattgggatgaaaggcgagcgccggaggggcaaggggcacgatggcctttaccagggtctcagtacagccaccaaggacacctacgacgcccttcacatgcaggccctgccccctcgctgataagtttaaactgccagaacatttctctggcctaactggccggtaccggcttcattttttccatttactgcagaggcttcattttttccatttactgcagaggcttcattttttccatttactgcagaactagttaggcgtgtacggtgggaggcctatataagcagagctcgtttagtgaaccgtcagatcgcctggagacgccatccacgctgttttgacctccatagaagacaccgggaccgatccagcctcgagagacccaatgctagccaccatggccttaccagtgaccgccttgctcctgccgctggccttgctgctccacgccgccaggccgtacttcggcaagctggaaagcaagctgagcgtgatccggaacctgaacgaccaggtgctgttcatcgatcagggcaacagacccctgttcgaggacatgaccgacagcgactgcagagacaacgcccctcggaccatcttcatcatcagcatgtacaaggacagccagcctagaggcatggccgtgaccatctctgtgaagtgcgagaagatcagcaccctgagctgcgagaacaagatcatcagcttcaaagagatgaacccgccggacaacatcaaggacaccaagagcgacatcatattcttccagcggagcgtgcccggccacgacaacaagatgcagtttgagagcagcagctacgagggctacttcctggcctgcgagaaagagcgggacctgttcaagctgatcctgaagaaagaggacgaactgggcgaccgcagcatcatgttcaccgtgcagaacgaggactgataa

SEQ ID NO: 1662 - DNA, 2293 bp, Artificial Sequence
  hu20A108283zFoxp3NFATIL18
atggccttaccagtgaccgccttgctcctgccgctggccttgctgctccacgccgccaggccggaggtgcagctggttgaatctggcggcggacttgtgaagcctggcggatctctgagactgagctgtgccgccagcggcttcacctttagcacatacgccatgagctgggtccgacaggcccctggaaaaggccttgaatgggttgcctctatcggcagagccggcagcacctactacagcgattctgtgaagggcagattcaccatcagccgggacaacgccaagaacagcctgtacctgcagatgaactccctgagagccgaggacaccgccgtgtactattgtgccagaggacccatctacaacgactacgacgagttcgcctattggggccagggcacactggtcacagtcagctctggcggtggcggaagcggaggcggtggctccggtggcggaggcagcgacattgtgctgacccagtctccagcctccttggccgtgtctccaggacagagggccaccatcacctgcaagagcagccagagcgtgctgtactccagcaaccagaagaactacctggcctggtatcagcagaaaccaggacaacctcctaaactcctgatttactgggccagcaccagagaaagcggggtcccagccaggttcagcggcagtgggtctgggaccgatttcaccctcacaattaatcctgtggaagctaatgatactgcaaattattactgtcaccagtacctgagcagcctgaccttcggcggagggaccaaggtggagatcaaacgaacaacaacccctgcccccagacctcctaccccagcccctacaattgccagccagcctctgagcctgaggcccgaggcttgtagacctgctgctggcggagccgtgcacaccagaggactggatttcgcctgcgacatctacatctgggcgcccttggccgggacttgtggggtccttctcctgtcactggttatcaccctttactgcaggagtaagaggagcaggctcctgcacagtgactacatgaacatgactcctagaagacctgggcctaccagaaagcattaccagccctatgccccaccacgcgacttcgcagcctatcgctccagagtgaagttcagcaggagcgcagacgcccccgcgtacaagcagggccagaaccagctctataacgagctcaatctaggacgaagagaggagtacgatgttttggacaagagacgtggccgggaccctgagatggggggaaagccgagaaggaagaaccctcaggaaggcctgtacaatgaactgcagaaagataagatggcggaggcctacagtgagattgggatgaaaggcgagcgccggaggggcaaggggcacgatggcctttaccagggtctcagtacagccaccaaggacacctacgacgcccttcacatgcaggccctgccccctcgctgataagtttaaactgccagaacatttctctggcctaactggccggtaccggcttcattttttccatttactgcagaggcttcattttttccatttactgcagaggcttcattttttccatttactgcagaactagttaggcgtgtacggtgggaggcctatataagcagagctcgtttagtgaaccgtcagatcgcctggagacgccatccacgctgttttgacctccatagaagacaccgggaccgatccagcctcgagagacccaatgctagccaccatggccttaccagtgaccgccttgctcctgccgctggccttgctgctccacgccgccaggccgtacttcggcaagctggaaagcaagctgagcgtgatccggaacctgaacgaccaggtgctgttcatcgatcagggcaacagacccctgttcgaggacatgaccgacagcgactgcagagacaacgcccctcggaccatcttcatcatcagcatgtacaaggacagccagcctagaggcatggccgtgaccatctctgtgaagtgcgagaagatcagcaccctgagctgcgagaacaagatcatcagcttcaaagagatgaacccgccggacaacatcaaggacaccaagagcgacatcatattcttccagcggagcgtgcccggccacgacaacaagatgcagtttgagagcagcagctacgagggctacttcctggcctgcgagaaagagcgggacctgttcaagctgatcctgaagaaagaggacgaactgggcgaccgcagcatcatgttcaccgtgcagaacgaggactgataa

SEQ ID NO: 1663 - DNA, 2293 bp, Artificial Sequence
  mu20A10841BB3z1XXFoxp3NFATIL18
atggccttaccagtgaccgccttgctcctgccgctggccttgctgctccacgccgccaggccggaagtgatgctggtggaatctggcggcggactggttaagcctggcggatctctgaagctgagctgtgccgccagcggcttcacctttagcacatacgccatgagctggatccggcagacccctgagaagagactggaatgggttgccagcatcggcagagccggcagcacctactacagcgattctgtgaagggcagattcaccatcagccgggacaacgtgcggaacatcctgtacctgcagatgagcagcctgcggagcgaggataccgccatgtactactgtgccagaggacccatctacaacgactacgacgagttcgcctattggggccagggcacactggttacagtttctgctggtggcggaggatctggcggaggtggaagcggcggaggcggatccaatatcatgatgacacagagcccgagcagcctggctgtgtctgctggcgagaaagtgaccatgtcctgcaagagcagccagagcgtgctgtactccagcaaccagaagaactacctggcctggtatcagcagaagcccggccagtctcctaagctgctgatctactgggccagcaccagagaaagcggcgtgcccgatagattcacaggcagcggcagcggaaccgacttcaccctgacaatcagctctgtgcaggccgaagatctggccgtgtactattgccaccagtacctgtccagcctgacctttggcgccggaacaaagctggaactgaagacaacaacccctgcccccagacctcctaccccagcccctacaattgccagccagcctctgagcctgaggcccgaggcttgtagacctgctgctggcggagccgtgcacaccagaggactggatttcgcctgcgacatctacatctgggcgcccttggccgggacttgtggggtccttctcctgtcactggttatcaccctttactgcaaacggggcagaaagaaactcctgtatatattcaaacaaccatttatgagaccagtacaaactactcaagaggaagatggctgtagctgccgatttccagaagaagaagaaggaggatgtgaactgagagtgaagttcagcaggagcgcagacgcccccgcgtacaagcagggccagaaccagctctataacgagctcaatctaggacgaagagaggagtacgatgttttggacaagagacgtggccgggaccctgagatggggggaaagccgagaaggaagaaccctcaggaaggcctgttcaatgaactgcagaaagataagatggcggaggccttcagtgagattgggatgaaaggcgagcgccggaggggcaaggggcacgatggccttttccagggtctcagtacagccaccaaggacaccttcgacgcccttcacatgcaggccctgccccctcgctgataagtttaaactgccagaacatttctctggcctaactggccggtaccggcttcattttttccatttactgcagaggcttcattttttccatttactgcagaggcttcattttttccatttactgcagaactagttaggcgtgtacggtgggaggcctatataagcagagctcgtttagtgaaccgtcagatcgcctggagacgccatccacgctgttttgacctccatagaagacaccgggaccgatccagcctcgagagacccaatgctagccaccatggccttaccagtgaccgccttgctcctgccgctggccttgctgctccacgccgccaggccgtacttcggcaagctggaaagcaagctgagcgtgatccggaacctgaacgaccaggtgctgttcatcgatcagggcaacagacccctgttcgaggacatgaccgacagcgactgcagagacaacgcccctcggaccatcttcatcatcagcatgtacaaggacagccagcctagaggcatggccgtgaccatctctgtgaagtgcgagaagatcagcaccctgagctgcgagaacaagatcatcagcttcaaagagatgaacccgccggacaacatcaaggacaccaagagcgacatcatattcttccagcggagcgtgcccggccacgacaacaagatgcagtttgagagcagcagctacgagggctacttcctggcctgcgagaaagagcgggacctgttcaagctgatcctgaagaaagaggacgaactgggcgaccgcagcatcatgttcaccgtgcagaacgaggactgataa

SEQ ID NO: 1664 - DNA, 2296 bp, Artificial Sequence
  hu20A10841BB3z1XXFoxp3NFATIL18
atggccttaccagtgaccgccttgctcctgccgctggccttgctgctccacgccgccaggccggaggtgcagctggttgaatctggcggcggacttgtgaagcctggcggatctctgagactgagctgtgccgccagcggcttcacctttagcacatacgccatgagctgggtccgacaggcccctggaaaaggccttgaatgggttgcctctatcggcagagccggcagcacctactacagcgattctgtgaagggcagattcaccatcagccgggacaacgccaagaacagcctgtacctgcagatgaactccctgagagccgaggacaccgccgtgtactattgtgccagaggacccatctacaacgactacgacgagttcgcctattggggccagggcacactggtcacagtcagctctggcggtggcggaagcggaggcggtggctccggtggcggaggcagcgacattgtgctgacccagtctccagcctccttggccgtgtctccaggacagagggccaccatcacctgcaagagcagccagagcgtgctgtactccagcaaccagaagaactacctggcctggtatcagcagaaaccaggacaacctcctaaactcctgatttactgggccagcaccagagaaagcggggtcccagccaggttcagcggcagtgggtctgggaccgatttcaccctcacaattaatcctgtggaagctaatgatactgcaaattattactgtcaccagtacctgagcagcctgaccttcggcggagggaccaaggtggagatcaaacgaacaacaacccctgcccccagacctcctaccccagcccctacaattgccagccagcctctgagcctgaggcccgaggcttgtagacctgctgctggcggagccgtgcacaccagaggactggatttcgcctgcgacatctacatctgggcgcccttggccgggacttgtggggtccttctcctgtcactggttatcaccctttactgcaaacggggcagaaagaaactcctgtatatattcaaacaaccatttatgagaccagtacaaactactcaagaggaagatggctgtagctgccgatttccagaagaagaagaaggaggatgtgaactgagagtgaagttcagcaggagcgcagacgcccccgcgtacaagcagggccagaaccagctctataacgagctcaatctaggacgaagagaggagtacgatgttttggacaagagacgtggccgggaccctgagatggggggaaagccgagaaggaagaaccctcaggaaggcctgttcaatgaactgcagaaagataagatggcggaggccttcagtgagattgggatgaaaggcgagcgccggaggggcaaggggcacgatggccttttccagggtctcagtacagccaccaaggacaccttcgacgcccttcacatgcaggccctgccccctcgctgataagtttaaactgccagaacatttctctggcctaactggccggtaccggcttcattttttccatttactgcagaggcttcattttttccatttactgcagaggcttcattttttccatttactgcagaactagttaggcgtgtacggtgggaggcctatataagcagagctcgtttagtgaaccgtcagatcgcctggagacgccatccacgctgttttgacctccatagaagacaccgggaccgatccagcctcgagagacccaatgctagccaccatggccttaccagtgaccgccttgctcctgccgctggccttgctgctccacgccgccaggccgtacttcggcaagctggaaagcaagctgagcgtgatccggaacctgaacgaccaggtgctgttcatcgatcagggcaacagacccctgttcgaggacatgaccgacagcgactgcagagacaacgcccctcggaccatcttcatcatcagcatgtacaaggacagccagcctagaggcatggccgtgaccatctctgtgaagtgcgagaagatcagcaccctgagctgcgagaacaagatcatcagcttcaaagagatgaacccgccggacaacatcaaggacaccaagagcgacatcatattcttccagcggagcgtgcccggccacgacaacaagatgcagtttgagagcagcagctacgagggctacttcctggcctgcgagaaagagcgggacctgttcaagctgatcctgaagaaagaggacgaactgggcgaccgcagcatcatgttcaccgtgcagaacgaggactgataa

SEQ ID NO: 1665 - DNA, 2290 bp, Artificial Sequence
  mu20A108283z1XXFoxp3NFATIL18
atggccttaccagtgaccgccttgctcctgccgctggccttgctgctccacgccgccaggccggaagtgatgctggtggaatctggcggcggactggttaagcctggcggatctctgaagctgagctgtgccgccagcggcttcacctttagcacatacgccatgagctggatccggcagacccctgagaagagactggaatgggttgccagcatcggcagagccggcagcacctactacagcgattctgtgaagggcagattcaccatcagccgggacaacgtgcggaacatcctgtacctgcagatgagcagcctgcggagcgaggataccgccatgtactactgtgccagaggacccatctacaacgactacgacgagttcgcctattggggccagggcacactggttacagtttctgctggtggcggaggatctggcggaggtggaagcggcggaggcggatccaatatcatgatgacacagagcccgagcagcctggctgtgtctgctggcgagaaagtgaccatgtcctgcaagagcagccagagcgtgctgtactccagcaaccagaagaactacctggcctggtatcagcagaagcccggccagtctcctaagctgctgatctactgggccagcaccagagaaagcggcgtgcccgatagattcacaggcagcggcagcggaaccgacttcaccctgacaatcagctctgtgcaggccgaagatctggccgtgtactattgccaccagtacctgtccagcctgacctttggcgccggaacaaagctggaactgaagacaacaacccctgcccccagacctcctaccccagcccctacaattgccagccagcctctgagcctgaggcccgaggcttgtagacctgctgctggcggagccgtgcacaccagaggactggatttcgcctgcgacatctacatctgggcgcccttggccgggacttgtggggtccttctcctgtcactggttatcaccctttactgcaggagtaagaggagcaggctcctgcacagtgactacatgaacatgactcctagaagacctgggcctaccagaaagcattaccagccctatgccccaccacgcgacttcgcagcctatcgctccagagtgaagttcagcaggagcgcagacgcccccgcgtacaagcagggccagaaccagctctataacgagctcaatctaggacgaagagaggagtacgatgttttggacaagagacgtggccgggaccctgagatggggggaaagccgagaaggaagaaccctcaggaaggcctgttcaatgaactgcagaaagataagatggcggaggccttcagtgagattgggatgaaaggcgagcgccggaggggcaaggggcacgatggccttttccagggtctcagtacagccaccaaggacaccttcgacgcccttcacatgcaggccctgccccctcgctgataagtttaaactgccagaacatttctctggcctaactggccggtaccggcttcattttttccatttactgcagaggcttcattttttccatttactgcagaggcttcattttttccatttactgcagaactagttaggcgtgtacggtgggaggcctatataagcagagctcgtttagtgaaccgtcagatcgcctggagacgccatccacgctgttttgacctccatagaagacaccgggaccgatccagcctcgagagacccaatgctagccaccatggccttaccagtgaccgccttgctcctgccgctggccttgctgctccacgccgccaggccgtacttcggcaagctggaaagcaagctgagcgtgatccggaacctgaacgaccaggtgctgttcatcgatcagggcaacagacccctgttcgaggacatgaccgacagcgactgcagagacaacgcccctcggaccatcttcatcatcagcatgtacaaggacagccagcctagaggcatggccgtgaccatctctgtgaagtgcgagaagatcagcaccctgagctgcgagaacaagatcatcagcttcaaagagatgaacccgccggacaacatcaaggacaccaagagcgacatcatattcttccagcggagcgtgcccggccacgacaacaagatgcagtttgagagcagcagctacgagggctacttcctggcctgcgagaaagagcgggacctgttcaagctgatcctgaagaaagaggacgaactgggcgaccgcagcatcatgttcaccgtgcagaacgaggactgataa

SEQ ID NO: 1666 - DNA, 2293 bp, Artificial Sequence
  hu20A108283z1XXFoxp3NFATIL18
atggccttaccagtgaccgccttgctcctgccgctggccttgctgctccacgccgccaggccggaggtgcagctggttgaatctggcggcggacttgtgaagcctggcggatctctgagactgagctgtgccgccagcggcttcacctttagcacatacgccatgagctgggtccgacaggcccctggaaaaggccttgaatgggttgcctctatcggcagagccggcagcacctactacagcgattctgtgaagggcagattcaccatcagccgggacaacgccaagaacagcctgtacctgcagatgaactccctgagagccgaggacaccgccgtgtactattgtgccagaggacccatctacaacgactacgacgagttcgcctattggggccagggcacactggtcacagtcagctctggcggtggcggaagcggaggcggtggctccggtggcggaggcagcgacattgtgctgacccagtctccagcctccttggccgtgtctccaggacagagggccaccatcacctgcaagagcagccagagcgtgctgtactccagcaaccagaagaactacctggcctggtatcagcagaaaccaggacaacctcctaaactcctgatttactgggccagcaccagagaaagcggggtcccagccaggttcagcggcagtgggtctgggaccgatttcaccctcacaattaatcctgtggaagctaatgatactgcaaattattactgtcaccagtacctgagcagcctgaccttcggcggagggaccaaggtggagatcaaacgaacaacaacccctgcccccagacctcctaccccagcccctacaattgccagccagcctctgagcctgaggcccgaggcttgtagacctgctgctggcggagccgtgcacaccagaggactggatttcgcctgcgacatctacatctgggcgcccttggccgggacttgtggggtccttctcctgtcactggttatcaccctttactgcaggagtaagaggagcaggctcctgcacagtgactacatgaacatgactcctagaagacctgggcctaccagaaagcattaccagccctatgccccaccacgcgacttcgcagcctatcgctccagagtgaagttcagcaggagcgcagacgcccccgcgtacaagcagggccagaaccagctctataacgagctcaatctaggacgaagagaggagtacgatgttttggacaagagacgtggccgggaccctgagatggggggaaagccgagaaggaagaaccctcaggaaggcctgttcaatgaactgcagaaagataagatggcggaggccttcagtgagattgggatgaaaggcgagcgccggaggggcaaggggcacgatggccttttccagggtctcagtacagccaccaaggacaccttcgacgcccttcacatgcaggccctgccccctcgctgataagtttaaactgccagaacatttctctggcctaactggccggtaccggcttcattttttccatttactgcagaggcttcattttttccatttactgcagaggcttcattttttccatttactgcagaactagttaggcgtgtacggtgggaggcctatataagcagagctcgtttagtgaaccgtcagatcgcctggagacgccatccacgctgttttgacctccatagaagacaccgggaccgatccagcctcgagagacccaatgctagccaccatggccttaccagtgaccgccttgctcctgccgctggccttgctgctccacgccgccaggccgtacttcggcaagctggaaagcaagctgagcgtgatccggaacctgaacgaccaggtgctgttcatcgatcagggcaacagacccctgttcgaggacatgaccgacagcgactgcagagacaacgcccctcggaccatcttcatcatcagcatgtacaaggacagccagcctagaggcatggccgtgaccatctctgtgaagtgcgagaagatcagcaccctgagctgcgagaacaagatcatcagcttcaaagagatgaacccgccggacaacatcaaggacaccaagagcgacatcatattcttccagcggagcgtgcccggccacgacaacaagatgcagtttgagagcagcagctacgagggctacttcctggcctgcgagaaagagcgggacctgttcaagctgatcctgaagaaagaggacgaactgggcgaccgcagcatcatgttcaccgtgcagaacgaggactgataa

SEQ ID NO: 1667 - DNA, 2290 bp, Artificial Sequence
  mu25E6841BB3zFoxp3NFATIL18
atggccttaccagtgaccgccttgctcctgccgctggccttgctgctccacgccgccaggccggaggtgcagctggtggagtctgggggagacttagtgaagcctggagggtccctgaaactctcctgtgcagcctctggtttcactttcagtagttatggaatgtcttgggttcgccagactccagacaagaggctggagtgggtcgcaaccattagtaatggtggtagacacaccttctatccagacagtgtgaaggggcgattcaccatctccagagacaatgccaagaacaccctgtatctgcaaatgagcagtctgaagtctgaggacacagccatgtatttatgtgtaagacagactgggacggagggctggtttgcttactggggccaagggactctggtcactgtctctgcaggtggcggaggatctggcggaggtggaagcggcggaggcggatccgatgttgtgatgacccagactccactcactttgtcggttaccattggacaaccagcctccatctcttgcaagtcaagtcagagcctcttagatagtgatggaaagacatatttgaattggttgttacagaggccaggccagtctccaaagcgcctaatctatctggtgtctaaactggactctggagtccctgacaggttcactggcagtggatcagggacagatttcacactgaaaatcagcagagtggaggctgaggatttgggagtttattattgctggcaaggtacacattttcctcagacgttcggtggaggcaccaagctggaaatcaaaacaacaacccctgcccccagacctcctaccccagcccctacaattgccagccagcctctgagcctgaggcccgaggcttgtagacctgctgctggcggagccgtgcacaccagaggactggatttcgcctgcgacatctacatctgggcgcccttggccgggacttgtggggtccttctcctgtcactggttatcaccctttactgcaaacggggcagaaagaaactcctgtatatattcaaacaaccatttatgagaccagtacaaactactcaagaggaagatggctgtagctgccgatttccagaagaagaagaaggaggatgtgaactgagagtgaagttcagcaggagcgcagacgcccccgcgtacaagcagggccagaaccagctctataacgagctcaatctaggacgaagagaggagtacgatgttttggacaagagacgtggccgggaccctgagatggggggaaagccgagaaggaagaaccctcaggaaggcctgtacaatgaactgcagaaagataagatggcggaggcctacagtgagattgggatgaaaggcgagcgccggaggggcaaggggcacgatggcctttaccagggtctcagtacagccaccaaggacacctacgacgcccttcacatgcaggccctgccccctcgctgataagtttaaactgccagaacatttctctggcctaactggccggtaccggcttcattttttccatttactgcagaggcttcattttttccatttactgcagaggcttcattttttccatttactgcagaactagttaggcgtgtacggtgggaggcctatataagcagagctcgtttagtgaaccgtcagatcgcctggagacgccatccacgctgttttgacctccatagaagacaccgggaccgatccagcctcgagagacccaatgctagccaccatggccttaccagtgaccgccttgctcctgccgctggccttgctgctccacgccgccaggccgtacttcggcaagctggaaagcaagctgagcgtgatccggaacctgaacgaccaggtgctgttcatcgatcagggcaacagacccctgttcgaggacatgaccgacagcgactgcagagacaacgcccctcggaccatcttcatcatcagcatgtacaaggacagccagcctagaggcatggccgtgaccatctctgtgaagtgcgagaagatcagcaccctgagctgcgagaacaagatcatcagcttcaaagagatgaacccgccggacaacatcaaggacaccaagagcgacatcatattcttccagcggagcgtgcccggccacgacaacaagatgcagtttgagagcagcagctacgagggctacttcctggcctgcgagaaagagcgggacctgttcaagctgatcctgaagaaagaggacgaactgggcgaccgcagcatcatgttcaccgtgcagaacgaggactgataa

SEQ ID NO: 1668 - DNA, 2290 bp, Artificial Sequence
  hu25E6841BB3zFoxp3NFATIL18
atggccttaccagtgaccgccttgctcctgccgctggccttgctgctccacgccgccaggccggaggtgcagctggtggaatctggcggaggactggtcaagcctggaggcagcctgagactgagctgcgccgccagcggcttcacattcagcagctacggcatgagctgggtgcggcaggcccctggcaagggcctggaatgggtcagcaccatcagcaacggcggaagacacaccttctaccccgacagcgtgaagggcagattcaccatctcaagagataacgccaagaacagcctgtacctgcagatgaacagcctgcgggccgaggacaccgccgtgtactactgcgccagacagaccggcacagagggctggttcgcctactggggccagggcaccctggtgaccgtgtccagcggcggtggcggaagcggaggcggtggctccggtggcggaggcagcgacatcgtgatgacccagacccctctgtctctgagcgtgacccctggccagcctgccagcatctcttgtaaaagcagccagagcctgctggacagcgacggcaagacctacctgaactggtacctgcagaagcccggccaaagccctcagctgctgatctacctggtgtccaagctggatagcggtgttcctgatagattcagcggatctggcagcggcaccgacttcaccctgaagatcagcagagtggaagccgaggacgtgggcgtgtactactgctggcagggcacacacttcccccagacattcggccagggcaccaaggtggaaatcaagacaacaacccctgcccccagacctcctaccccagcccctacaattgccagccagcctctgagcctgaggcccgaggcttgtagacctgctgctggcggagccgtgcacaccagaggactggatttcgcctgcgacatctacatctgggcgcccttggccgggacttgtggggtccttctcctgtcactggttatcaccctttactgcaaacggggcagaaagaaactcctgtatatattcaaacaaccatttatgagaccagtacaaactactcaagaggaagatggctgtagctgccgatttccagaagaagaagaaggaggatgtgaactgagagtgaagttcagcaggagcgcagacgcccccgcgtacaagcagggccagaaccagctctataacgagctcaatctaggacgaagagaggagtacgatgttttggacaagagacgtggccgggaccctgagatggggggaaagccgagaaggaagaaccctcaggaaggcctgtacaatgaactgcagaaagataagatggcggaggcctacagtgagattgggatgaaaggcgagcgccggaggggcaaggggcacgatggcctttaccagggtctcagtacagccaccaaggacacctacgacgcccttcacatgcaggccctgccccctcgctgataagtttaaactgccagaacatttctctggcctaactggccggtaccggcttcattttttccatttactgcagaggcttcattttttccatttactgcagaggcttcattttttccatttactgcagaactagttaggcgtgtacggtgggaggcctatataagcagagctcgtttagtgaaccgtcagatcgcctggagacgccatccacgctgttttgacctccatagaagacaccgggaccgatccagcctcgagagacccaatgctagccaccatggccttaccagtgaccgccttgctcctgccgctggccttgctgctccacgccgccaggccgtacttcggcaagctggaaagcaagctgagcgtgatccggaacctgaacgaccaggtgctgttcatcgatcagggcaacagacccctgttcgaggacatgaccgacagcgactgcagagacaacgcccctcggaccatcttcatcatcagcatgtacaaggacagccagcctagaggcatggccgtgaccatctctgtgaagtgcgagaagatcagcaccctgagctgcgagaacaagatcatcagcttcaaagagatgaacccgccggacaacatcaaggacaccaagagcgacatcatattcttccagcggagcgtgcccggccacgacaacaagatgcagtttgagagcagcagctacgagggctacttcctggcctgcgagaaagagcgggacctgttcaagctgatcctgaagaaagaggacgaactgggcgaccgcagcatcatgttcaccgtgcagaacgaggactgataa

SEQ ID NO: 1669 - DNA, 2287 bp, Artificial Sequence
  mu25E68283zFoxp3NFATIL18
atggccttaccagtgaccgccttgctcctgccgctggccttgctgctccacgccgccaggccggaggtgcagctggtggagtctgggggagacttagtgaagcctggagggtccctgaaactctcctgtgcagcctctggtttcactttcagtagttatggaatgtcttgggttcgccagactccagacaagaggctggagtgggtcgcaaccattagtaatggtggtagacacaccttctatccagacagtgtgaaggggcgattcaccatctccagagacaatgccaagaacaccctgtatctgcaaatgagcagtctgaagtctgaggacacagccatgtatttatgtgtaagacagactgggacggagggctggtttgcttactggggccaagggactctggtcactgtctctgcaggtggcggaggatctggcggaggtggaagcggcggaggcggatccgatgttgtgatgacccagactccactcactttgtcggttaccattggacaaccagcctccatctcttgcaagtcaagtcagagcctcttagatagtgatggaaagacatatttgaattggttgttacagaggccaggccagtctccaaagcgcctaatctatctggtgtctaaactggactctggagtccctgacaggttcactggcagtggatcagggacagatttcacactgaaaatcagcagagtggaggctgaggatttgggagtttattattgctggcaaggtacacattttcctcagacgttcggtggaggcaccaagctggaaatcaaaacaacaacccctgcccccagacctcctaccccagcccctacaattgccagccagcctctgagcctgaggcccgaggcttgtagacctgctgctggcggagccgtgcacaccagaggactggatttcgcctgcgacatctacatctgggcgcccttggccgggacttgtggggtccttctcctgtcactggttatcaccctttactgcaggagtaagaggagcaggctcctgcacagtgactacatgaacatgactcctagaagacctgggcctaccagaaagcattaccagccctatgccccaccacgcgacttcgcagcctatcgctccagagtgaagttcagcaggagcgcagacgcccccgcgtacaagcagggccagaaccagctctataacgagctcaatctaggacgaagagaggagtacgatgttttggacaagagacgtggccgggaccctgagatggggggaaagccgagaaggaagaaccctcaggaaggcctgtacaatgaactgcagaaagataagatggcggaggcctacagtgagattgggatgaaaggcgagcgccggaggggcaaggggcacgatggcctttaccagggtctcagtacagccaccaaggacacctacgacgcccttcacatgcaggccctgccccctcgctgataagtttaaactgccagaacatttctctggcctaactggccggtaccggcttcattttttccatttactgcagaggcttcattttttccatttactgcagaggcttcattttttccatttactgcagaactagttaggcgtgtacggtgggaggcctatataagcagagctcgtttagtgaaccgtcagatcgcctggagacgccatccacgctgttttgacctccatagaagacaccgggaccgatccagcctcgagagacccaatgctagccaccatggccttaccagtgaccgccttgctcctgccgctggccttgctgctccacgccgccaggccgtacttcggcaagctggaaagcaagctgagcgtgatccggaacctgaacgaccaggtgctgttcatcgatcagggcaacagacccctgttcgaggacatgaccgacagcgactgcagagacaacgcccctcggaccatcttcatcatcagcatgtacaaggacagccagcctagaggcatggccgtgaccatctctgtgaagtgcgagaagatcagcaccctgagctgcgagaacaagatcatcagcttcaaagagatgaacccgccggacaacatcaaggacaccaagagcgacatcatattcttccagcggagcgtgcccggccacgacaacaagatgcagtttgagagcagcagctacgagggctacttcctggcctgcgagaaagagcgggacctgttcaagctgatcctgaagaaagaggacgaactgggcgaccgcagcatcatgttcaccgtgcagaacgaggactgataa

SEQ ID NO: 1670 - DNA, 2287 bp, Artificial Sequence
  hu25E68283zFoxp3NFATIL18
atggccttaccagtgaccgccttgctcctgccgctggccttgctgctccacgccgccaggccggaggtgcagctggtggaatctggcggaggactggtcaagcctggaggcagcctgagactgagctgcgccgccagcggcttcacattcagcagctacggcatgagctgggtgcggcaggcccctggcaagggcctggaatgggtcagcaccatcagcaacggcggaagacacaccttctaccccgacagcgtgaagggcagattcaccatctcaagagataacgccaagaacagcctgtacctgcagatgaacagcctgcgggccgaggacaccgccgtgtactactgcgccagacagaccggcacagagggctggttcgcctactggggccagggcaccctggtgaccgtgtccagcggcggtggcggaagcggaggcggtggctccggtggcggaggcagcgacatcgtgatgacccagacccctctgtctctgagcgtgacccctggccagcctgccagcatctcttgtaaaagcagccagagcctgctggacagcgacggcaagacctacctgaactggtacctgcagaagcccggccaaagccctcagctgctgatctacctggtgtccaagctggatagcggtgttcctgatagattcagcggatctggcagcggcaccgacttcaccctgaagatcagcagagtggaagccgaggacgtgggcgtgtactactgctggcagggcacacacttcccccagacattcggccagggcaccaaggtggaaatcaagacaacaacccctgcccccagacctcctaccccagcccctacaattgccagccagcctctgagcctgaggcccgaggcttgtagacctgctgctggcggagccgtgcacaccagaggactggatttcgcctgcgacatctacatctgggcgcccttggccgggacttgtggggtccttctcctgtcactggttatcaccctttactgcaggagtaagaggagcaggctcctgcacagtgactacatgaacatgactcctagaagacctgggcctaccagaaagcattaccagccctatgccccaccacgcgacttcgcagcctatcgctccagagtgaagttcagcaggagcgcagacgcccccgcgtacaagcagggccagaaccagctctataacgagctcaatctaggacgaagagaggagtacgatgttttggacaagagacgtggccgggaccctgagatggggggaaagccgagaaggaagaaccctcaggaaggcctgtacaatgaactgcagaaagataagatggcggaggcctacagtgagattgggatgaaaggcgagcgccggaggggcaaggggcacgatggcctttaccagggtctcagtacagccaccaaggacacctacgacgcccttcacatgcaggccctgccccctcgctgataagtttaaactgccagaacatttctctggcctaactggccggtaccggcttcattttttccatttactgcagaggcttcattttttccatttactgcagaggcttcattttttccatttactgcagaactagttaggcgtgtacggtgggaggcctatataagcagagctcgtttagtgaaccgtcagatcgcctggagacgccatccacgctgttttgacctccatagaagacaccgggaccgatccagcctcgagagacccaatgctagccaccatggccttaccagtgaccgccttgctcctgccgctggccttgctgctccacgccgccaggccgtacttcggcaagctggaaagcaagctgagcgtgatccggaacctgaacgaccaggtgctgttcatcgatcagggcaacagacccctgttcgaggacatgaccgacagcgactgcagagacaacgcccctcggaccatcttcatcatcagcatgtacaaggacagccagcctagaggcatggccgtgaccatctctgtgaagtgcgagaagatcagcaccctgagctgcgagaacaagatcatcagcttcaaagagatgaacccgccggacaacatcaaggacaccaagagcgacatcatattcttccagcggagcgtgcccggccacgacaacaagatgcagtttgagagcagcagctacgagggctacttcctggcctgcgagaaagagcgggacctgttcaagctgatcctgaagaaagaggacgaactgggcgaccgcagcatcatgttcaccgtgcagaacgaggactgataa

SEQ ID NO: 1671 - DNA, 2290 bp, Artificial Sequence
  mu25E6841BB3z1XXFoxp3NFATIL18
atggccttaccagtgaccgccttgctcctgccgctggccttgctgctccacgccgccaggccggaggtgcagctggtggagtctgggggagacttagtgaagcctggagggtccctgaaactctcctgtgcagcctctggtttcactttcagtagttatggaatgtcttgggttcgccagactccagacaagaggctggagtgggtcgcaaccattagtaatggtggtagacacaccttctatccagacagtgtgaaggggcgattcaccatctccagagacaatgccaagaacaccctgtatctgcaaatgagcagtctgaagtctgaggacacagccatgtatttatgtgtaagacagactgggacggagggctggtttgcttactggggccaagggactctggtcactgtctctgcaggtggcggaggatctggcggaggtggaagcggcggaggcggatccgatgttgtgatgacccagactccactcactttgtcggttaccattggacaaccagcctccatctcttgcaagtcaagtcagagcctcttagatagtgatggaaagacatatttgaattggttgttacagaggccaggccagtctccaaagcgcctaatctatctggtgtctaaactggactctggagtccctgacaggttcactggcagtggatcagggacagatttcacactgaaaatcagcagagtggaggctgaggatttgggagtttattattgctggcaaggtacacattttcctcagacgttcggtggaggcaccaagctggaaatcaaaacaacaacccctgcccccagacctcctaccccagcccctacaattgccagccagcctctgagcctgaggcccgaggcttgtagacctgctgctggcggagccgtgcacaccagaggactggatttcgcctgcgacatctacatctgggcgcccttggccgggacttgtggggtccttctcctgtcactggttatcaccctttactgcaaacggggcagaaagaaactcctgtatatattcaaacaaccatttatgagaccagtacaaactactcaagaggaagatggctgtagctgccgatttccagaagaagaagaaggaggatgtgaactgagagtgaagttcagcaggagcgcagacgcccccgcgtacaagcagggccagaaccagctctataacgagctcaatctaggacgaagagaggagtacgatgttttggacaagagacgtggccgggaccctgagatggggggaaagccgagaaggaagaaccctcaggaaggcctgttcaatgaactgcagaaagataagatggcggaggccttcagtgagattgggatgaaaggcgagcgccggaggggcaaggggcacgatggccttttccagggtctcagtacagccaccaaggacaccttcgacgcccttcacatgcaggccctgccccctcgctgataagtttaaactgccagaacatttctctggcctaactggccggtaccggcttcattttttccatttactgcagaggcttcattttttccatttactgcagaggcttcattttttccatttactgcagaactagttaggcgtgtacggtgggaggcctatataagcagagctcgtttagtgaaccgtcagatcgcctggagacgccatccacgctgttttgacctccatagaagacaccgggaccgatccagcctcgagagacccaatgctagccaccatggccttaccagtgaccgccttgctcctgccgctggccttgctgctccacgccgccaggccgtacttcggcaagctggaaagcaagctgagcgtgatccggaacctgaacgaccaggtgctgttcatcgatcagggcaacagacccctgttcgaggacatgaccgacagcgactgcagagacaacgcccctcggaccatcttcatcatcagcatgtacaaggacagccagcctagaggcatggccgtgaccatctctgtgaagtgcgagaagatcagcaccctgagctgcgagaacaagatcatcagcttcaaagagatgaacccgccggacaacatcaaggacaccaagagcgacatcatattcttccagcggagcgtgcccggccacgacaacaagatgcagtttgagagcagcagctacgagggctacttcctggcctgcgagaaagagcgggacctgttcaagctgatcctgaagaaagaggacgaactgggcgaccgcagcatcatgttcaccgtgcagaacgaggactgataa

SEQ ID NO: 1672 - DNA, 2290 bp, Artificial Sequence
  hu25E6841BB3z1XXFoxp3NFATIL18
atggccttaccagtgaccgccttgctcctgccgctggccttgctgctccacgccgccaggccggaggtgcagctggtggaatctggcggaggactggtcaagcctggaggcagcctgagactgagctgcgccgccagcggcttcacattcagcagctacggcatgagctgggtgcggcaggcccctggcaagggcctggaatgggtcagcaccatcagcaacggcggaagacacaccttctaccccgacagcgtgaagggcagattcaccatctcaagagataacgccaagaacagcctgtacctgcagatgaacagcctgcgggccgaggacaccgccgtgtactactgcgccagacagaccggcacagagggctggttcgcctactggggccagggcaccctggtgaccgtgtccagcggcggtggcggaagcggaggcggtggctccggtggcggaggcagcgacatcgtgatgacccagacccctctgtctctgagcgtgacccctggccagcctgccagcatctcttgtaaaagcagccagagcctgctggacagcgacggcaagacctacctgaactggtacctgcagaagcccggccaaagccctcagctgctgatctacctggtgtccaagctggatagcggtgttcctgatagattcagcggatctggcagcggcaccgacttcaccctgaagatcagcagagtggaagccgaggacgtgggcgtgtactactgctggcagggcacacacttcccccagacattcggccagggcaccaaggtggaaatcaagacaacaacccctgcccccagacctcctaccccagcccctacaattgccagccagcctctgagcctgaggcccgaggcttgtagacctgctgctggcggagccgtgcacaccagaggactggatttcgcctgcgacatctacatctgggcgcccttggccgggacttgtggggtccttctcctgtcactggttatcaccctttactgcaaacggggcagaaagaaactcctgtatatattcaaacaaccatttatgagaccagtacaaactactcaagaggaagatggctgtagctgccgatttccagaagaagaagaaggaggatgtgaactgagagtgaagttcagcaggagcgcagacgcccccgcgtacaagcagggccagaaccagctctataacgagctcaatctaggacgaagagaggagtacgatgttttggacaagagacgtggccgggaccctgagatggggggaaagccgagaaggaagaaccctcaggaaggcctgttcaatgaactgcagaaagataagatggcggaggccttcagtgagattgggatgaaaggcgagcgccggaggggcaaggggcacgatggccttttccagggtctcagtacagccaccaaggacaccttcgacgcccttcacatgcaggccctgccccctcgctgataagtttaaactgccagaacatttctctggcctaactggccggtaccggcttcattttttccatttactgcagaggcttcattttttccatttactgcagaggcttcattttttccatttactgcagaactagttaggcgtgtacggtgggaggcctatataagcagagctcgtttagtgaaccgtcagatcgcctggagacgccatccacgctgttttgacctccatagaagacaccgggaccgatccagcctcgagagacccaatgctagccaccatggccttaccagtgaccgccttgctcctgccgctggccttgctgctccacgccgccaggccgtacttcggcaagctggaaagcaagctgagcgtgatccggaacctgaacgaccaggtgctgttcatcgatcagggcaacagacccctgttcgaggacatgaccgacagcgactgcagagacaacgcccctcggaccatcttcatcatcagcatgtacaaggacagccagcctagaggcatggccgtgaccatctctgtgaagtgcgagaagatcagcaccctgagctgcgagaacaagatcatcagcttcaaagagatgaacccgccggacaacatcaaggacaccaagagcgacatcatattcttccagcggagcgtgcccggccacgacaacaagatgcagtttgagagcagcagctacgagggctacttcctggcctgcgagaaagagcgggacctgttcaagctgatcctgaagaaagaggacgaactgggcgaccgcagcatcatgttcaccgtgcagaacgaggactgataa

SEQ ID NO: 1673 - DNA, 2287 bp, Artificial Sequence
  mu25E68283z1XXFoxp3NFATIL18
atggccttaccagtgaccgccttgctcctgccgctggccttgctgctccacgccgccaggccggaggtgcagctggtggagtctgggggagacttagtgaagcctggagggtccctgaaactctcctgtgcagcctctggtttcactttcagtagttatggaatgtcttgggttcgccagactccagacaagaggctggagtgggtcgcaaccattagtaatggtggtagacacaccttctatccagacagtgtgaaggggcgattcaccatctccagagacaatgccaagaacaccctgtatctgcaaatgagcagtctgaagtctgaggacacagccatgtatttatgtgtaagacagactgggacggagggctggtttgcttactggggccaagggactctggtcactgtctctgcaggtggcggaggatctggcggaggtggaagcggcggaggcggatccgatgttgtgatgacccagactccactcactttgtcggttaccattggacaaccagcctccatctcttgcaagtcaagtcagagcctcttagatagtgatggaaagacatatttgaattggttgttacagaggccaggccagtctccaaagcgcctaatctatctggtgtctaaactggactctggagtccctgacaggttcactggcagtggatcagggacagatttcacactgaaaatcagcagagtggaggctgaggatttgggagtttattattgctggcaaggtacacattttcctcagacgttcggtggaggcaccaagctggaaatcaaaacaacaacccctgcccccagacctcctaccccagcccctacaattgccagccagcctctgagcctgaggcccgaggcttgtagacctgctgctggcggagccgtgcacaccagaggactggatttcgcctgcgacatctacatctgggcgcccttggccgggacttgtggggtccttctcctgtcactggttatcaccctttactgcaggagtaagaggagcaggctcctgcacagtgactacatgaacatgactcctagaagacctgggcctaccagaaagcattaccagccctatgccccaccacgcgacttcgcagcctatcgctccagagtgaagttcagcaggagcgcagacgcccccgcgtacaagcagggccagaaccagctctataacgagctcaatctaggacgaagagaggagtacgatgttttggacaagagacgtggccgggaccctgagatggggggaaagccgagaaggaagaaccctcaggaaggcctgttcaatgaactgcagaaagataagatggcggaggccttcagtgagattgggatgaaaggcgagcgccggaggggcaaggggcacgatggccttttccagggtctcagtacagccaccaaggacaccttcgacgcccttcacatgcaggccctgccccctcgctgataagtttaaactgccagaacatttctctggcctaactggccggtaccggcttcattttttccatttactgcagaggcttcattttttccatttactgcagaggcttcattttttccatttactgcagaactagttaggcgtgtacggtgggaggcctatataagcagagctcgtttagtgaaccgtcagatcgcctggagacgccatccacgctgttttgacctccatagaagacaccgggaccgatccagcctcgagagacccaatgctagccaccatggccttaccagtgaccgccttgctcctgccgctggccttgctgctccacgccgccaggccgtacttcggcaagctggaaagcaagctgagcgtgatccggaacctgaacgaccaggtgctgttcatcgatcagggcaacagacccctgttcgaggacatgaccgacagcgactgcagagacaacgcccctcggaccatcttcatcatcagcatgtacaaggacagccagcctagaggcatggccgtgaccatctctgtgaagtgcgagaagatcagcaccctgagctgcgagaacaagatcatcagcttcaaagagatgaacccgccggacaacatcaaggacaccaagagcgacatcatattcttccagcggagcgtgcccggccacgacaacaagatgcagtttgagagcagcagctacgagggctacttcctggcctgcgagaaagagcgggacctgttcaagctgatcctgaagaaagaggacgaactgggcgaccgcagcatcatgttcaccgtgcagaacgaggactgataa

SEQ ID NO: 1674 - DNA, 2287 bp, Artificial Sequence
  hu25E68283z1XXFoxp3NFATIL18
atggccttaccagtgaccgccttgctcctgccgctggccttgctgctccacgccgccaggccggaggtgcagctggtggaatctggcggaggactggtcaagcctggaggcagcctgagactgagctgcgccgccagcggcttcacattcagcagctacggcatgagctgggtgcggcaggcccctggcaagggcctggaatgggtcagcaccatcagcaacggcggaagacacaccttctaccccgacagcgtgaagggcagattcaccatctcaagagataacgccaagaacagcctgtacctgcagatgaacagcctgcgggccgaggacaccgccgtgtactactgcgccagacagaccggcacagagggctggttcgcctactggggccagggcaccctggtgaccgtgtccagcggcggtggcggaagcggaggcggtggctccggtggcggaggcagcgacatcgtgatgacccagacccctctgtctctgagcgtgacccctggccagcctgccagcatctcttgtaaaagcagccagagcctgctggacagcgacggcaagacctacctgaactggtacctgcagaagcccggccaaagccctcagctgctgatctacctggtgtccaagctggatagcggtgttcctgatagattcagcggatctggcagcggcaccgacttcaccctgaagatcagcagagtggaagccgaggacgtgggcgtgtactactgctggcagggcacacacttcccccagacattcggccagggcaccaaggtggaaatcaagacaacaacccctgcccccagacctcctaccccagcccctacaattgccagccagcctctgagcctgaggcccgaggcttgtagacctgctgctggcggagccgtgcacaccagaggactggatttcgcctgcgacatctacatctgggcgcccttggccgggacttgtggggtccttctcctgtcactggttatcaccctttactgcaggagtaagaggagcaggctcctgcacagtgactacatgaacatgactcctagaagacctgggcctaccagaaagcattaccagccctatgccccaccacgcgacttcgcagcctatcgctccagagtgaagttcagcaggagcgcagacgcccccgcgtacaagcagggccagaaccagctctataacgagctcaatctaggacgaagagaggagtacgatgttttggacaagagacgtggccgggaccctgagatggggggaaagccgagaaggaagaaccctcaggaaggcctgttcaatgaactgcagaaagataagatggcggaggccttcagtgagattgggatgaaaggcgagcgccggaggggcaaggggcacgatggccttttccagggtctcagtacagccaccaaggacaccttcgacgcccttcacatgcaggccctgccccctcgctgataagtttaaactgccagaacatttctctggcctaactggccggtaccggcttcattttttccatttactgcagaggcttcattttttccatttactgcagaggcttcattttttccatttactgcagaactagttaggcgtgtacggtgggaggcctatataagcagagctcgtttagtgaaccgtcagatcgcctggagacgccatccacgctgttttgacctccatagaagacaccgggaccgatccagcctcgagagacccaatgctagccaccatggccttaccagtgaccgccttgctcctgccgctggccttgctgctccacgccgccaggccgtacttcggcaagctggaaagcaagctgagcgtgatccggaacctgaacgaccaggtgctgttcatcgatcagggcaacagacccctgttcgaggacatgaccgacagcgactgcagagacaacgcccctcggaccatcttcatcatcagcatgtacaaggacagccagcctagaggcatggccgtgaccatctctgtgaagtgcgagaagatcagcaccctgagctgcgagaacaagatcatcagcttcaaagagatgaacccgccggacaacatcaaggacaccaagagcgacatcatattcttccagcggagcgtgcccggccacgacaacaagatgcagtttgagagcagcagctacgagggctacttcctggcctgcgagaaagagcgggacctgttcaagctgatcctgaagaaagaggacgaactgggcgaccgcagcatcatgttcaccgtgcagaacgaggactgataa

SEQ ID NO: 1675 - DNA, 1482 bp, Artificial Sequence
  pCDH MSCV h20A10-O CAR 41BB
atggccttaccagtgaccgccttgctcctgccgctggccttgctgctccacgccgccaggccggaggtgcagctggttgaatctggcggcggacttgtgaagcctggcggatctctgagactgagctgtgccgccagcggcttcacctttagcacatacgccatgagctgggtccgacaggcccctggaaaaggccttgaatgggttgcctctatcggcagagccggcagcacctactacagcgattctgtgaagggcagattcaccatcagccgggacaacgccaagaacagcctgtacctgcagatgaactccctgagagccgaggacaccgccgtgtactattgtgccagaggacccatctacaacgactacgacgagttcgcctattggggccagggcacactggtcacagtcagctctggcggtggcggaagcggaggcggtggctccggtggcggaggcagcgacatcgtgatgacacagagccctgatagcctggccgtgtctctgggagagagagccaccatcaactgcaagagcagccagagcgtgctgtactccagcaaccagaagaactacctggcctggtatcagcagaagcccggccagcctcctaagctgctgatctactgggccagcaccagagaaagcggcgtgcccgatagattttctggcagcggctctggcaccgacttcaccctgacaattagctccctgcaggccgaggatgtggccgtgtactactgtcaccagtacctgagcagcctgacctttggcggcggaacaaaggtggaaatcaagcgaacaacaacccctgcccccagacctcctaccccagcccctacaattgccagccagcctctgagcctgaggcccgaggcttgtagacctgctgctggcggagccgtgcacaccagaggactggatttcgcctgcgacatctacatctgggcgcccttggccgggacttgtggggtccttctcctgtcactggttatcaccctttactgcaaacggggcagaaagaaactcctgtatatattcaaacaaccatttatgagaccagtacaaactactcaagaggaagatggctgtagctgccgatttccagaagaagaagaaggaggatgtgaactgagagtgaagttcagcaggagcgcagacgcccccgcgtacaagcagggccagaaccagctctataacgagctcaatctaggacgaagagaggagtacgatgttttggacaagagacgtggccgggaccctgagatggggggaaagccgagaaggaagaaccctcaggaaggcctgtacaatgaactgcagaaagataagatggcggaggcctacagtgagattgggatgaaaggcgagcgccggaggggcaaggggcacgatggcctttaccagggtctcagtacagccaccaaggacacctacgacgcccttcacatgcaggccctgccccctcgctgataa

SEQ ID NO: 1676 - DNA, 63 bp, Artificial Sequence
  CD8 leader sequence
atggccttaccagtgaccgccttgctcctgccgctggccttgctgctccacgccgccaggccg

SEQ ID NO: 1677 - DNA, 744 bp, Artificial Sequence
  h20A10O scFV
gaggtgcagctggttgaatctggcggcggacttgtgaagcctggcggatctctgagactgagctgtgccgccagcggcttcacctttagcacatacgccatgagctgggtccgacaggcccctggaaaaggccttgaatgggttgcctctatcggcagagccggcagcacctactacagcgattctgtgaagggcagattcaccatcagccgggacaacgccaagaacagcctgtacctgcagatgaactccctgagagccgaggacaccgccgtgtactattgtgccagaggacccatctacaacgactacgacgagttcgcctattggggccagggcacactggtcacagtcagctctggcggtggcggaagcggaggcggtggctccggtggcggaggcagcgacatcgtgatgacacagagccctgatagcctggccgtgtctctgggagagagagccaccatcaactgcaagagcagccagagcgtgctgtactccagcaaccagaagaactacctggcctggtatcagcagaagcccggccagcctcctaagctgctgatctactgggccagcaccagagaaagcggcgtgcccgatagattttctggcagcggctctggcaccgacttcaccctgacaattagctccctgcaggccgaggatgtggccgtgtactactgtcaccagtacctgagcagcctgacctttggcggcggaacaaaggtggaaatcaagcga

SEQ ID NO: 1678 - DNA, 135 bp, Artificial Sequence
  CD8 hinge region
acaacaacccctgcccccagacctcctaccccagcccctacaattgccagccagcctctgagcctgaggcccgaggcttgtagacctgctgctggcggagccgtgcacaccagaggactggatttcgcctgcgac

SEQ ID NO: 1679 - DNA, 63 bp, Artificial Sequence; identical to SEQ ID NO: 1676
  CD8 leader sequence

SEQ ID NO: 1680 - DNA, 744 bp, Artificial Sequence; identical to SEQ ID NO: 1580
  h20A10N scFV

SEQ ID NO: 1681 - DNA, 135 bp, Artificial Sequence; identical to SEQ ID NO: 1678
  CD8 hinge region

SEQ ID NO: 1682 - DNA, 72 bp, Artificial Sequence; identical to SEQ ID NO: 656
  CD8 transmembrane domain

SEQ ID NO: 1683 - DNA, 126 bp, Artificial Sequence; identical to SEQ ID NO: 658
  41BB

SEQ ID NO: 1684 - DNA, 342 bp, Artificial Sequence
  CD3
agagtgaagttcagcaggagcgcagacgcccccgcgtacaagcagggccagaaccagctctataacgagctcaatctaggacgaagagaggagtacgatgttttggacaagagacgtggccgggaccctgagatggggggaaagccgagaaggaagaaccctcaggaaggcctgtacaatgaactgcagaaagataagatggcggaggcctacagtgagattgggatgaaaggcgagcgccggaggggcaaggggcacgatggcctttaccagggtctcagtacagccaccaaggacacctacgacgcccttcacatgcaggccctgccccctcgctgataa

SEQ ID NO: 1685 - DNA, 1482 bp, Artificial Sequence; identical to SEQ ID NO: 1584
  pCDH MSCV h20A10-C2 CAR 41BB

SEQ ID NO: 1686 - DNA, 63 bp, Artificial Sequence; identical to SEQ ID NO: 1676
  CD8 leader sequence

SEQ ID NO: 1687 - DNA, 744 bp, Artificial Sequence; identical to SEQ ID NO: 1578
  h20A10C2 scFV

SEQ ID NO: 1688 - DNA, 135 bp, Artificial Sequence; identical to SEQ ID NO: 1678
  CD8 hinge region

SEQ ID NO: 1689 - DNA, 72 bp, Artificial Sequence; identical to SEQ ID NO: 656
  CD8 transmembrane region

SEQ ID NO: 1690 - DNA, 126 bp, Artificial Sequence; identical to SEQ ID NO: 658
  41BB

SEQ ID NO: 1691 - DNA, 342 bp, Artificial Sequence; identical to SEQ ID NO: 1684
  CD3

SEQ ID NO: 1692 - DNA, 1479 bp, Artificial Sequence
  pCDH MSCV h20A10-O CAR CD28 1XX
atggccttaccagtgaccgccttgctcctgccgctggccttgctgctccacgccgccaggccggaggtgcagctggttgaatctggcggcggacttgtgaagcctggcggatctctgagactgagctgtgccgccagcggcttcacctttagcacatacgccatgagctgggtccgacaggcccctggaaaaggccttgaatgggttgcctctatcggcagagccggcagcacctactacagcgattctgtgaagggcagattcaccatcagccgggacaacgccaagaacagcctgtacctgcagatgaactccctgagagccgaggacaccgccgtgtactattgtgccagaggacccatctacaacgactacgacgagttcgcctattggggccagggcacactggtcacagtcagctctggcggtggcggaagcggaggcggtggctccggtggcggaggcagcgacatcgtgatgacacagagccctgatagcctggccgtgtctctgggagagagagccaccatcaactgcaagagcagccagagcgtgctgtactccagcaaccagaagaactacctggcctggtatcagcagaagcccggccagcctcctaagctgctgatctactgggccagcaccagagaaagcggcgtgcccgatagattttctggcagcggctctggcaccgacttcaccctgacaattagctccctgcaggccgaggatgtggccgtgtactactgtcaccagtacctgagcagcctgacctttggcggcggaacaaaggtggaaatcaagcgaacaacaacccctgcccccagacctcctaccccagcccctacaattgccagccagcctctgagcctgaggcccgaggcttgtagacctgctgctggcggagccgtgcacaccagaggactggatttcgcctgcgacatctacatctgggcgcccttggccgggacttgtggggtccttctcctgtcactggttatcaccctttactgcaggagtaagaggagcaggctcctgcacagtgactacatgaacatgactcctagaagacctgggcctaccagaaagcattaccagccctatgccccaccacgcgacttcgcagcctatcgctccagagtgaagttcagcaggagcgcagacgcccccgcgtacaagcagggccagaaccagctctataacgagctcaatctaggacgaagagaggagtacgatgttttggacaagagacgtggccgggaccctgagatggggggaaagccgagaaggaagaaccctcaggaaggcctgttcaatgaactgcagaaagataagatggcggaggccttcagtgagattgggatgaaaggcgagcgccggaggggcaaggggcacgatggccttttccagggtctcagtacagccaccaaggacaccttcgacgcccttcacatgcaggccctgccccctcgctgataa

SEQ ID NO: 1693 - DNA, 63 bp, Artificial Sequence; identical to SEQ ID NO: 1676
  CD8 leader sequence

SEQ ID NO: 1694 - DNA, 744 bp, Artificial Sequence; identical to SEQ ID NO: 1677
  h20A10O scFV

SEQ ID NO: 1695 - DNA, 135 bp, Artificial Sequence; identical to SEQ ID NO: 1678
  CD8 hinge region

SEQ ID NO: 1696 - DNA, 72 bp, Artificial Sequence; identical to SEQ ID NO: 656
  CD8 transmembrane region

SEQ ID NO: 1697 - DNA, 123 bp, Artificial Sequence
  CD28
aggagtaagaggagcaggctcctgcacagtgactacatgaacatgactcctagaagacctgggcctaccagaaagcattaccagccctatgccccaccacgcgacttcgcagcctatcgctcc

SEQ ID NO: 1698 - DNA, 342 bp, Artificial Sequence
  CD3 1XX
agagtgaagttcagcaggagcgcagacgcccccgcgtacaagcagggccagaaccagctctataacgagctcaatctaggacgaagagaggagtacgatgttttggacaagagacgtggccgggaccctgagatggggggaaagccgagaaggaagaaccctcaggaaggcctgttcaatgaactgcagaaagataagatggcggaggccttcagtgagattgggatgaaaggcgagcgccggaggggcaaggggcacgatggccttttccagggtctcagtacagccaccaaggacaccttcgacgcccttcacatgcaggccctgccccctcgctgataa

SEQ ID NO: 1699 - DNA, 1479 bp, Artificial Sequence
  pCDH MSCV h20A10-N CAR CD28 1XX
atggccttaccagtgaccgccttgctcctgccgctggccttgctgctccacgccgccaggccgcaggtgcagctggttgaatctggcggcggacttgtgaagcctggcggatctctgagactgagctgtgccgccagcggcttcacctttagcacatacgccatgagctggatcagacaggcccctggcaaaggcctggaatgggtggcgtctattggcagagccggcagcacctactacagcgactctgtgaagggcagattcaccatcagccgggacaacgccaagaacagcctgtacctgcagatgaactccctgagagccgaggacaccgccgtgtactattgtgccagaggacccatctacaacgactacgacgagttcgcctattggggccagggcacactggtcacagtttctagcggcggtggcggaagcggaggcggtggctccggtggcggaggcagcgaaattgtgctgacacagagccccgccacactgtcactttctccaggcgaaagagccacactgagctgcaagagcagccagagcgtgctgtactccagcaaccagaagaactacctggcctggtatcagcagaagcccggccaagctcctcggctgctgatctattgggccagcacaagagagagcggcatccctgccagattttctggcagcggctctggcaccgatttcaccctgaccataagcagcctggaacctgaggacttcgccgtgtattactgccaccagtacctgagcagcctgacctttggcggaggcaccaaggtggaaatcaagcggacaacaacccctgcccccagacctcctaccccagcccctacaattgccagccagcctctgagcctgaggcccgaggcttgtagacctgctgctggcggagccgtgcacaccagaggactggatttcgcctgcgacatctacatctgggcgcccttggccgggacttgtggggtccttctcctgtcactggttatcaccctttactgcaggagtaagaggagcaggctcctgcacagtgactacatgaacatgactcctagaagacctgggcctaccagaaagcattaccagccctatgccccaccacgcgacttcgcagcctatcgctccagagtgaagttcagcaggagcgcagacgcccccgcgtacaagcagggccagaaccagctctataacgagctcaatctaggacgaagagaggagtacgatgttttggacaagagacgtggccgggaccctgagatggggggaaagccgagaaggaagaaccctcaggaaggcctgttcaatgaactgcagaaagataagatggcggaggccttcagtgagattgggatgaaaggcgagcgccggaggggcaaggggcacgatggccttttccagggtctcagtacagccaccaaggacaccttcgacgcccttcacatgcaggccctgccccctcgctgataa

SEQ ID NO: 1700 - DNA, 63 bp, Artificial Sequence; identical to SEQ ID NO: 1676
  CD8 leader sequence

SEQ ID NO: 1701 - DNA, 744 bp, Artificial Sequence; identical to SEQ ID NO: 1580
  h20A10N scFV

SEQ ID NO: 1702 - DNA, 135 bp, Artificial Sequence; identical to SEQ ID NO: 1678
  CD8 hinge region

SEQ ID NO: 1703 - DNA, 72 bp, Artificial Sequence; identical to SEQ ID NO: 656
  CD8 transmembrane domain

SEQ ID NO: 1704 - DNA, 123 bp, Artificial Sequence; identical to SEQ ID NO: 1697
  CD28

SEQ ID NO: 1705 - DNA, 342 bp, Artificial Sequence; identical to SEQ ID NO: 1698
  CD3 1XX

SEQ ID NO: 1706 - DNA, 1479 bp, Artificial Sequence; identical to SEQ ID NO: 1596
  pCDH MSCV h20A10-C2 CAR CD28 1XX

SEQ ID NO: 1707 - DNA, 63 bp, Artificial Sequence; identical to SEQ ID NO: 1676
  CD8 leader sequence

SEQ ID NO: 1708 - DNA, 744 bp, Artificial Sequence; identical to SEQ ID NO: 1578
  h20A10C2 scFV

SEQ ID NO: 1709 - DNA, 135 bp, Artificial Sequence; identical to SEQ ID NO: 1678
  CD8 hinge region

SEQ ID NO: 1710 - DNA, 72 bp, Artificial Sequence; identical to SEQ ID NO: 656
  CD8 transmembrane region

SEQ ID NO: 1711 - DNA, 123 bp, Artificial Sequence; identical to SEQ ID NO: 1697
  CD28

SEQ ID NO: 1712 - DNA, 342 bp, Artificial Sequence; identical to SEQ ID NO: 1698
  CD3 1XX

SEQ ID NO: 1713 - DNA, 2380 bp, Artificial Sequence
  pCDH MSCV hC2 CAR 41BB 6xNFATFoxP3 IL18
atggccttaccagtgaccgccttgctcctgccgctggccttgctgctccacgccgccaggccggaggtgcagctggtggagtctgggggaggcctggtcaagcctggggggtccctgagactctcctgtgcagcctctggattcaccttcagtggctatgccatgagctgggtccgccaggctccagggaaggggctggagtgggtctcaaccattagtagtggcggaacctacatatactaccccgactcagtgaagggccgattcaccatctccagagacaacgccaagaactcactgtatctgcaaatgaacagcctgagagccgaggacacggccgtgtattactgtgcgagacttgggggggataattactacgaatacttcgatgtctggggcaaagggaccacggtcaccgtctcctccggcggtggcggatccggcggtggcggatccggcggtggcggatccgacattgtgctgacccagtctccagcctccttggccgtgtctccaggacagagggccaccatcacctgcagagccagtaagagtgtcagtaccagcggatactcctacatgcactggtatcagcagaaaccaggacaacctcctaaactcctgatttacctggcatccaatctggagagcggggtcccagccaggttcagcggcagtgggtctgggaccgatttcaccctcacaattaatcctgtggaagctaatgatactgcaaattattactgtcagcacagtagggagctgcctttcacattcggcggagggaccaaggtggagatcaaacgaactacaacaacccctgcccccagacctcctaccccagcccctacaattgccagccagcctctgagcctgaggcccgaggcttgtagacctgctgctggcggagccgtgcacaccagaggactggatttcgcctgcgacatctacatctgggcgcccttggccgggacttgtggggtccttctcctgtcactggttatcaccctttactgcaaacggggcagaaagaaactcctgtatatattcaaacaaccatttatgagaccagtacaaactactcaagaggaagatggctgtagctgccgatttccagaagaagaagaaggaggatgtgaactgagagtgaagttcagcaggagcgcagacgcccccgcgtacaagcagggccagaaccagctctataacgagctcaatctaggacgaagagaggagtacgatgttttggacaagagacgtggccgggaccctgagatggggggaaagccgagaaggaagaaccctcaggaaggcctgtacaatgaactgcagaaagataagatggcggaggcctacagtgagattgggatgaaaggcgagcgccggaggggcaaggggcacgatggcctttaccagggtctcagtacagccaccaaggacacctacgacgcccttcacatgcaggccctgccccctcgctgataagtttaaactgccagaacatttctctggcctaactggccggtaccggcttcattttttccatttactgcagaggcttcattttttccatttactgcagaggcttcattttttccatttactgcagaggcttcattttttccatttactgcagaggcttcattttttccatttactgcagaggcttcattttttccatttactgcagaactagttaggcgtgtacggtgggaggcctatataagcagagctcgtttagtgaaccgtcagatcgcctggagacgccatccacgctgttttgacctccatagaagacaccgggaccgatccagcctcgagagacccaatgctagccaccatggccttaccagtgaccgccttgctcctgccgctggccttgctgctccacgccgccaggccgtacttcggcaagctggaaagcaagctgagcgtgatccggaacctgaacgaccaggtgctgttcatcgatcagggcaacagacccctgttcgaggacatgaccgacagcgactgcagagacaacgcccctcggaccatcttcatcatcagcatgtacaaggacagccagcctagaggcatggccgtgaccatctctgtgaagtgcgagaagatcagcaccctgagctgcgagaacaagatcatcagcttcaaagagatgaacccgccggacaacatcaaggacaccaagagcgacatcatattcttccagcggagcgtgcccggccacgacaacaagatgcagtttgagagcagcagctacgagggctacttcctggcctgcgagaaagagcgggacctgttcaagctgatcctgaagaaagaggacgaactgggcgaccgcagcatcatgttcaccgtgcagaacgaggactgataa

SEQ ID NO: 1714 - DNA, 63 bp, Artificial Sequence; identical to SEQ ID NO: 1676
  CD8 leader sequence

SEQ ID NO: 1715 - DNA, 747 bp, Artificial Sequence; identical to SEQ ID NO: 238
  C2 scFV

SEQ ID NO: 1716 - DNA, 135 bp, Artificial Sequence; identical to SEQ ID NO: 1678
  CD8 hinge region

SEQ ID NO: 1717 - DNA, 72 bp, Artificial Sequence; identical to SEQ ID NO: 656
  CD8 transmembrane region

SEQ ID NO: 1718 - DNA, 126 bp, Artificial Sequence; identical to SEQ ID NO: 658
  41BB

SEQ ID NO: 1719 - DNA, 336 bp, Artificial Sequence; identical to SEQ ID NO: 660
  CD3

SEQ ID NO: 1720 - DNA, 50 bp, Artificial Sequence
  plasmid
tgataagtttaaactgccagaacatttctctggcctaactggccggtacc

SEQ ID NO: 1721 - DNA, 168 bp, Artificial Sequence
  6xNFAT FoxP3
ggcttcattttttccatttactgcagaggcttcattttttccatttactgcagaggcttcattttttccatttactgcagaggcttcattttttccatttactgcagaggcttcattttttccatttactgcagaggcttcattttttccatttactgcagaactagt

SEQ ID NO: 1722 - DNA, 118 bp, Artificial Sequence; identical to SEQ ID NO: 778
  mCMV

SEQ ID NO: 1723 - DNA, 25 bp, Artificial Sequence
  plasmid
ctcgagagacccaatgctagccacc

SEQ ID NO: 1724 - DNA, 63 bp, Artificial Sequence; identical to SEQ ID NO: 1676
  CD8 leader sequence

SEQ ID NO: 1725 - DNA, 477 bp, Artificial Sequence
  IL18
tacttcggcaagctggaaagcaagctgagcgtgatccggaacctgaacgaccaggtgctgttcatcgatcagggcaacagacccctgttcgaggacatgaccgacagcgactgcagagacaacgcccctcggaccatcttcatcatcagcatgtacaaggacagccagcctagaggcatggccgtgaccatctctgtgaagtgcgagaagatcagcaccctgagctgcgagaacaagatcatcagcttcaaagagatgaacccgccggacaacatcaaggacaccaagagcgacatcatattcttccagcggagcgtgcccggccacgacaacaagatgcagtttgagagcagcagctacgagggctacttcctggcctgcgagaaagagcgggacctgttcaagctgatcctgaagaaagaggacgaactgggcgaccgcagcatcatgttcaccgtgcagaacgaggactgataa

SEQ ID NO: 1726 - DNA, 1482 bp, Artificial Sequence; identical to SEQ ID NO: 1624
  pCDH MSCV hC2 CAR CD28 1XX

SEQ ID NO: 1727 - DNA, 63 bp, Artificial Sequence; identical to SEQ ID NO: 1676
  CD8 leader sequence

SEQ ID NO: 1728 - DNA, 747 bp, Artificial Sequence; identical to SEQ ID NO: 238
  C2 scFV

SEQ ID NO: 1729 - DNA, 135 bp, Artificial Sequence; identical to SEQ ID NO: 1678
  CD8 hinge region

SEQ ID NO: 1730 - DNA, 72 bp, Artificial Sequence; identical to SEQ ID NO: 656
  CD8 transmembrane region

SEQ ID NO: 1731 - DNA, 123 bp, Artificial Sequence; identical to SEQ ID NO: 1697
  CD28

SEQ ID NO: 1732 - DNA, 342 bp, Artificial Sequence; identical to SEQ ID NO: 1698
  CD3 1XX

SEQ ID NO: 1733 - DNA, 45 bp, Artificial Sequence; identical to SEQ ID NO: 1506
  Mouse B12 light chain variable framework 2 (FR2) sequence

SEQ ID NO: 1734 - protein, 15 aa, Artificial Sequence
  Mouse B12 light chain variable framework 2 (FR2) sequence
WYQQKPGQPPKLLIY

SEQ ID NO: 1735 - DNA, 21 bp, Artificial Sequence
  Mouse B12 light chain variable complementarity determining regions 2 (CDR2) sequence
cttgcatccaccctagattct

SEQ ID NO: 1736 - protein, 7 aa, Artificial Sequence
  Mouse B12 light chain variable complementarity determining regions 2 (CDR2) sequence
LASTLDS

SEQ ID NO: 1737 - DNA, 96 bp, Artificial Sequence; identical to SEQ ID NO: 1510
  Mouse B12 light chain variable framework 3 (FR3) sequence

SEQ ID NO: 1738 - protein, 32 aa, Artificial Sequence; identical to SEQ ID NO: 1511
  Mouse B12 light chain variable framework 3 (FR3) sequence

SEQ ID NO: 1739 - DNA, 27 bp, Artificial Sequence
  Mouse B12 light chain variable complementarity determining regions 3 (CDR3) sequence
cagcaaaataatgaggatcctccgacg

SEQ ID NO: 1740 - protein, 9 aa, Artificial Sequence
  Mouse B12 light chain variable complementarity determining regions 3 (CDR3) sequence
QQNNEDPPT

SEQ ID NO: 1741 - DNA, 31 bp, Artificial Sequence
  Mouse B12 light chain variable framework 4 (FR4) sequence
ttcggtggaggcaccaagctggaaatcaagg

SEQ ID NO: 1742 - protein, 10 aa, Artificial Sequence
  Mouse B12 light chain variable framework 4 (FR4) sequence
FGGGTKLEIK

SEQ ID NO: 1743 - protein, 10 aa, Artificial Sequence
  epitope to which NME1 and NME7AB bind part of the 10 membrane proximal PRT
PFPFSAQSGA

SEQ ID NO: 1744 - protein, 11 aa, Artificial Sequence
  epitope to which NME1 and NME7AB bind part of the 10 membrane proximal PRT
SNIKFRPGSVV

SEQ ID NO: 1745 - protein, 7 aa, Artificial Sequence
  epitope to which NME1 and NME7AB bind part of the 10 membrane proximal PRT
ASRYNLT

SEQ ID NO: 1746 - protein, 10 aa, Artificial Sequence
  Fragment of PSMGFR
GTINVHDVET

SEQ ID NO: 1747 - protein, 4 aa, Artificial Sequence
  Fragment of PSMGFR
FPFS

SEQ ID NO: 1748 - protein, 20 aa, Artificial Sequence
  Fragment of PSMGFR
SNIKFRPGSVVVQLTLAFRE

SEQ ID NO: 1749 - protein, 9 aa, Artificial Sequence
  Fragment of PSMGFR
QFNQYKTEA

SEQ ID NO: 1750 - protein, 9 aa, Artificial Sequence
  Fragment of PSMGFR
VQLTLAFRE

SEQ ID NO: 1751 - protein, 5 aa, Artificial Sequence
  Fragment of PSMGFR
SVSDV

SEQ ID NO: 1752 - DNA, 627 bp, Artificial Sequence
  IL18 sequence
atagaagacaccgggaccgatccagcctcgagagacccaatgctagccaccatggccttaccagtgaccgccttgctcctgccgctggccttgctgctccacgccgccaggccgtacttcggcaagctggaaagcaagctgagcgtgatccggaacctgaacgaccaggtgctgttcatcgatcagggcaacagacccctgttcgaggacatgaccgacagcgactgcagagacaacgcccctcggaccatcttcatcatcagcatgtacaaggacagccagcctagaggcatggccgtgaccatctctgtgaagtgcgagaagatcagcaccctgagctgcgagaacaagatcatcagcttcaaagagatgaacccgccggacaacatcaaggacaccaagagcgacatcatattcttccagcggagcgtgcccggccacgacaacaagatgcagtttgagagcagcagctacgagggctacttcctggcctgcgagaaagagcgggacctgttcaagctgatcctgaagaaagaggacgaactgggcgaccgcagcatcatgttcaccgtgcagaacgaggactgataaaagcttggcaatccggtactgttggtaaagccacca

SEQ ID NO: 1753 - protein, 207 aa, Artificial Sequence
  IL18 sequence
IEDTGTDPASRDPMLATMALPVTALLLPLALLLHAARPYFGKLESKLSVIRNLNDQVLFIDQGNRPLFEDMTDSDCRDNAPRTIFIISMYKDSQPRGMAVTISVKCEKISTLSCENKIISFKEMNPPDNIKDTKSDIIFFQRSVPGHDNKMQFESSSYEGYFLACEKERDLFKLILKKEDELGDRSIMFTVQNEDKLGNPVLLVKPP

SEQ ID NO: 1754 - DNA, 56 bp, Artificial Sequence
  Primer
agggagacccaagctggctagttaagcttggatggccttaccagtgaccgccttgc

SEQ ID NO: 1755 - DNA, 48 bp, Artificial Sequence
  Primer
taggccagagaaatgttctggcattatcagcgagggggcagggcctgc

SEQ ID NO: 1756 - DNA, 19 bp, Artificial Sequence
  Primer
tgccagaacatttctctgg

SEQ ID NO: 1757 - DNA, 52 bp, Artificial Sequence
  Primer
acagtcgaggctgatcagcgggtttaaacttatcagtcctcgttctgcacgg

SEQ ID NO: 1758 - DNA, 60 bp, Artificial Sequence
  Primer
atgcaggccctgccccctcgctgataagtttaaactgccagaacatttctctggcctaac

SEQ ID NO: 1759 - DNA, 59 bp, Artificial Sequence
  Primer
accggagcgatcgcagatccttcgcggccgcttatcagtcctcgttctgcacggtgaac

SEQ ID NO: 1760 - DNA, 31 bp, Artificial Sequence
  Primer
attgcactagttgaaagaccccacctgtagg

SEQ ID NO: 1761 - DNA, 26 bp, Artificial Sequence
  Primer
aatgctctagaatacgggtatccagg

SEQ ID NO: 1762 - DNA, 30 bp, Artificial Sequence
  Primer
atagcgaattcgtaccgagggccaccatgg

SEQ ID NO: 1763 - DNA, 44 bp, Artificial Sequence
  Primer
taggcctcccaccgtacacgcctaggtaccacgccttctgtatg

SEQ ID NO: 1764 - DNA, 44 bp, Artificial Sequence
  Primer
taggcctcccaccgtacacgcctaggtacctctgcagtaaatgg

SEQ ID NO: 1765 - DNA, 19 bp, Artificial Sequence
  Primer
taaggccatggtggctagc

SEQ ID NO: 1766 - DNA, 32 bp, Artificial Sequence
  Primer
aataagtttaaactgccagaacatttctctgg

SEQ ID NO: 1767 - DNA, 36 bp, Artificial Sequence
  Primer
atatagcggccgcttatcagtcctcgttctgcacgg

SEQ ID NO: 1768 - DNA, 347 bp, Artificial Sequence
  6x FoxP3NFAT mCMV
agaacatttctctggcctaactggccggtaccggcttcattttttccatttactgcagaggcttcattttttccatttactgcagaggcttcattttttccatttactgcagaggcttcattttttccatttactgcagaggcttcattttttccatttactgcagaggcttcattttttccatttactgcagaactagttaggcgtgtacggtgggaggcctatataagcagagctcgtttagtgaaccgtcagatcgcctggagacgccatccacgctgttttgacctccatagaagacaccgggaccgatccagcctcgagagacccaatgctagccaccatgg

SEQ ID NO: 1769 - protein, 116 aa, Artificial Sequence
  6x FoxP3NFAT mCMV
RTFLWPNWPVPASFFPFTAEASFFPFTAEASFFPFTAEASFFPFTAEASFFPFTAEASFFPFTAELVRRVRWEAYISRARLVNRQIAWRRHPRCFDLHRRHRDRSSLERPNASHHG

SEQ ID NO: 1770 - DNA, 343 bp, Artificial Sequence
  6x FoxP3NFAT mIL2P
agaacatttctctggcctaactggccggtaccggcttcattttttccatttactgcagaggcttcattttttccatttactgcagaggcttcattttttccatttactgcagaggcttcattttttccatttactgcagaggcttcattttttccatttactgcagaggcttcattttttccatttactgcagaactagtcattttgacacccccataatatttttccagaattaacagtataaattgcatctcttgttcaagagttccctatcactctctttaatcactactcacagtaacctcaactcctgcctcgagagacccaatgctagccaccatgg

SEQ ID NO: 1771 - protein, 113 aa, Artificial Sequence
  6x FoxP3NFAT mIL2P
  misc_feature (113)..(113): Xaa can be any naturally occurring amino acid
RTFLWPNWPVPASFFPFTAEASFFPFTAEASFFPFTAEASFFPFTAEASFFPFTAEASFFPFTAELVILTPPYFSRINSINCISCSRVPYHSLSLLTVTSTPASRDPMLATMX

SEQ ID NO: 1772 - DNA, 260 bp, Artificial Sequence
  6x FoxP3NFAT miniP
agaacatttctctggcctaactggccggtaccggcttcattttttccatttactgcagaggcttcattttttccatttactgcagaggcttcattttttccatttactgcagaggcttcattttttccatttactgcagaggcttcattttttccatttactgcagaggcttcattttttccatttactgcagaactagtagagggtatataatggaagctcgacttccagctcgagagacccaatgctagccaccatgg

SEQ ID NO: 1773 - protein, 86 aa, Artificial Sequence
  6x FoxP3NFAT miniP
RTFLWPNWPVPASFFPFTAEASFFPFTAEASFFPFTAEASFFPFTAEASFFPFTAEASFFPFTAELVEGIWKLDFQLERPNASHHG

SEQ ID NO: 1774 - DNA, 365 bp, Artificial Sequence
  6x IL2NFAT mCMV
agaacatttctctggcctaactggccggtaccggaggaaaaactgtttcatacagaaggcgtggaggaaaaactgtttcatacagaaggcgtggaggaaaaactgtttcatacagaaggcgtggaggaaaaactgtttcatacagaaggcgtggaggaaaaactgtttcatacagaaggcgtggaggaaaaactgtttcatacagaaggcgtactagttaggcgtgtacggtgggaggcctatataagcagagctcgtttagtgaaccgtcagatcgcctggagacgccatccacgctgttttgacctccatagaagacaccgggaccgatccagcctcgagagacccaatgctagccaccatgg

SEQ ID NO: 1775 - protein, 122 aa, Artificial Sequence
  6x IL2NFAT mCMV
RTFLWPNWPVPEEKLFHTEGVEEKLFHTEGVEEKLFHTEGVEEKLFHTEGVEEKLFHTEGVEEKLFHTEGVLVRRVRWEAYISRARLVNRQIAWRRHPRCFDLHRRHRDRSSLERPNASHHG

SEQ ID NO: 1776 - DNA, 361 bp, Artificial Sequence
  6x IL2NFAT mIL2P
agaacatttctctggcctaactggccggtaccggaggaaaaactgtttcatacagaaggcgtggaggaaaaactgtttcatacagaaggcgtggaggaaaaactgtttcatacagaaggcgtggaggaaaaactgtttcatacagaaggcgtggaggaaaaactgtttcatacagaaggcgtggaggaaaaactgtttcatacagaaggcgtactagtcattttgacacccccataatatttttccagaattaacagtataaattgcatctcttgttcaagagttccctatcactctctttaatcactactcacagtaacctcaactcctgcctcgagagacccaatgctagccaccatgg

SEQ ID NO: 1777 - protein, 119 aa, Artificial Sequence
  6x IL2NFAT mIL2P
  misc_feature (119)..(119): Xaa can be any naturally occurring amino acid
RTFLWPNWPVPEEKLFHTEGVEEKLFHTEGVEEKLFHTEGVEEKLFHTEGVEEKLFHTEGVEEKLFHTEGVLVILTPPYFSRINSINCISCSRVPYHSLSLLTVTSTPASRDPMLATMX

SEQ ID NO: 1778 - DNA, 278 bp, Artificial Sequence
  6x IL2NFAT miniP
agaacatttctctggcctaactggccggtaccggaggaaaaactgtttcatacagaaggcgtggaggaaaaactgtttcatacagaaggcgtggaggaaaaactgtttcatacagaaggcgtggaggaaaaactgtttcatacagaaggcgtggaggaaaaactgtttcatacagaaggcgtggaggaaaaactgtttcatacagaaggcgtactagtagagggtatataatggaagctcgacttccagctcgagagacccaatgctagccaccatgg

SEQ ID NO: 1779 - protein, 92 aa, Artificial Sequence
  6x IL2NFAT miniP
RTFLWPNWPVPEEKLFHTEGVEEKLFHTEGVEEKLFHTEGVEEKLFHTEGVEEKLFHTEGVEEKLFHTEGVLVEGIWKLDFQLERPNASHHG

SEQ ID NO: 1780 - DNA, 459 bp, Artificial Sequence
  Human NME1
atggccaactgtgagcgtaccttcattgcgatcaaaccagatggggtccagcggggtcttgtgggagagattatcaagcgttttgagcagaaaggattccgccttgttggtctgaaattcatgcaagcttccgaagatcttctcaaggaacactacgttgacctgaaggaccgtccattctttgccggcctggtgaaatacatgcactcagggccggtagttgccatggtctgggaggggctgaatgtggtgaagacgggccgagtcatgctcggggagaccaaccctgcagactccaagcctgggaccatccgtggagacttctgcatacaagttggcaggaacattatacatggcagtgattctgtggagagtgcagagaaggagatcggcttgtggtttcaccctgaggaactggtagattacacgagctgtgctcagaactggatctatgaatga

SEQ ID NO: 1781 - protein, 152 aa, Artificial Sequence
  Human NME1
MANCERTFIAIKPDGVQRGLVGEIIKRFEQKGFRLVGLKFMQASEDLLKEHYVDLKDRPFFAGLVKYMHSGPVVAMVWEGLNVVKTGRVMLGETNPADSKPGTIRGDFCIQVGRNIIHGSDSVESAEKEIGLWFHPEELVDYTSCAQNWIYE

SEQ ID NO: 1782 - DNA, 1131 bp, Artificial Sequence
  Human NME7
atgaatcatagtgaaagattcgttttcattgcagagtggtatgatccaaatgcttcacttcttcgacgttatgagcttttattttacccaggggatggatctgttgaaatgcatgatgtaaagaatcatcgcacctttttaaagcggaccaaatatgataacctgcacttggaagatttatttataggcaacaaagtgaatgtcttttctcgacaactggtattaattgactatggggatcaatatacagctcgccagctgggcagtaggaaagaaaaaacgctagccctaattaaaccagatgcaatatcaaaggctggagaaataattgaaataataaacaaagctggatttactataaccaaactcaaaatgatgatgctttcaaggaaagaagcattggattttcatgtagatcaccagtcaagaccctttttcaatgagctgatccagtttattacaactggtcctattattgccatggagattttaagagatgatgctatatgtgaatggaaaagactgctgggacctgcaaactctggagtggcacgcacagatgcttctgaaagcattagagccctctttggaacagatggcataagaaatgcagcgcatggccctgattcttttgcttctgcggccagagaaatggagttgttttttccttcaagtggaggttgtgggccggcaaacactgctaaatttactaattgtacctgttgcattgttaaaccccatgctgtcagtgaaggactgttgggaaagatcctgatggctatccgagatgcaggttttgaaatctcagctatgcagatgttcaatatggatcgggttaatgttgaggaattctatgaagtttataaaggagtagtgaccgaatatcatgacatggtgacagaaatgtattctggcccttgtgtagcaatggagattcaacagaataatgctacaaagacatttcgagaattttgtggacctgctgatcctgaaattgcccggcatttacgccctggaactctcagagcaatctttggtaaaactaagatccagaatgctgttcactgtactgatctgccagaggatggcctattagaggttcaatacttcttcaagatcttggataattag

SEQ ID NO: 1783 - protein, 376 aa, Artificial Sequence
  Human NME7
MNHSERFVFIAEWYDPNASLLRRYELLFYPGDGSVEMHDVKNHRTFLKRTKYDNLHLEDLFIGNKVNVFSRQLVLIDYGDQYTARQLGSRKEKTLALIKPDAISKAGEIIEIINKAGFTITKLKMMMLSRKEALDFHVDHQSRPFFNELIQFITTGPIIAMEILRDDAICEWKRLLGPANSGVARTDASESIRALFGTDGIRNAAHGPDSFASAAREMELFFPSSGGCGPANTAKFTNCTCCIVKPHAVSEGLLGKILMAIRDAGFEISAMQMFNMDRVNVEEFYEVYKGVVTEYHDMVTEMYSGPCVAMEIQQNNATKTFREFCGPADPEIARHLRPGTLRAIFGKTKIQNAVHCTDLPEDGLLEVQYFFKILDN

SEQ ID NO: 1784 - DNA, 1401 bp, Artificial Sequence
  [00947]	hC2 CD28 1XX (CD28 h/tm)
atggccttaccagtgaccgccttgctcctgccgctggccttgctgctccacgccgccaggccggaggtgcagctggtggagtctgggggaggcctggtcaagcctggggggtccctgagactctcctgtgcagcctctggattcaccttcagtggctatgccatgagctgggtccgccaggctccagggaaggggctggagtgggtctcaaccattagtagtggcggaacctacatatactaccccgactcagtgaagggccgattcaccatctccagagacaacgccaagaactcactgtatctgcaaatgaacagcctgagagccgaggacacggccgtgtattactgtgcgagacttgggggggataattactacgaatacttcgatgtctggggcaaagggaccacggtcaccgtctcctccggcggtggcggatccggcggtggcggatccggcggtggcggatccgacattgtgctgacccagtctccagcctccttggccgtgtctccaggacagagggccaccatcacctgcagagccagtaagagtgtcagtaccagcggatactcctacatgcactggtatcagcagaaaccaggacaacctcctaaactcctgatttacctggcatccaatctggagagcggggtcccagccaggttcagcggcagtgggtctgggaccgatttcaccctcacaattaatcctgtggaagctaatgatactgcaaattattactgtcagcacagtagggagctgcctttcacattcggcggagggaccaaggtggagatcaaacgaactaagcacctgtgtccttctccactgttccccggccctagcaagcctttctgggtcctggtggtggtgggcggagtgctggcctgctacagcctgctggtgaccgtggcctttatcatcttctgggtgaggagtaagaggagcaggctcctgcacagtgactacatgaacatgactcctagaagacctgggcctaccagaaagcattaccagccctatgccccaccacgcgacttcgcagcctatcgctccagagtgaagttcagcaggagcgcagacgcccccgcgtacaagcagggccagaaccagctctataacgagctcaatctaggacgaagagaggagtacgatgttttggacaagagacgtggccgggaccctgagatggggggaaagccgagaaggaagaaccctcaggaaggcctgttcaatgaactgcagaaagataagatggcggaggccttcagtgagattgggatgaaaggcgagcgccggaggggcaaggggcacgatggccttttccagggtctcagtacagccaccaaggacaccttcgacgcccttcacatgcaggccctgccccctcgctgataa

SEQ ID NO: 1785 - protein, 465 aa, Artificial Sequence
  [00947]	hC2 CD28 1XX (CD28 h/tm)
MALPVTALLLPLALLLHAARPEVQLVESGGGLVKPGGSLRLSCAASGFTFSGYAMSWVRQAPGKGLEWVSTISSGGTYIYYPDSVKGRFTISRDNAKNSLYLQMNSLRAEDTAVYYCARLGGDNYYEYFDVWGKGTTVTVSSGGGGSGGGGSGGGGSDIVLTQSPASLAVSPGQRATITCRASKSVSTSGYSYMHWYQQKPGQPPKLLIYLASNLESGVPARFSGSGSGTDFTLTINPVEANDTANYYCQHSRELPFTFGGGTKVEIKRTKHLCPSPLFPGPSKPFWVLVVVGGVLACYSLLVTVAFIIFWVRSKRSRLLHSDYMNMTPRRPGPTRKHYQPYAPPRDFAAYRSRVKFSRSADAPAYKQGQNQLYNELNLGRREEYDVLDKRRGRDPEMGGKPRRKNPQEGLFNELQKDKMAEAFSEIGMKGERRRGKGHDGLFQGLSTATKDTFDALHMQALPPR

SEQ ID NO: 1786 - DNA, 63 bp, Artificial Sequence; identical to SEQ ID NO: 1676
  CD8 leader sequence

SEQ ID NO: 1787 - protein, 21 aa, Artificial Sequence
  CD8 leader sequence
MALPVTALLLPLALLLHAARP

SEQ ID NO: 1788 - DNA, 747 bp, Artificial Sequence; identical to SEQ ID NO: 238
  hMNC2 scFV

SEQ ID NO: 1789 - protein, 249 aa, Artificial Sequence; identical to SEQ ID NO: 239
  hMNC2 scFV

SEQ ID NO: 1790 - DNA, 45 bp, Artificial Sequence
  CD28 hinge region (811-855)
aagcacctgtgtccttctccactgttccccggccctagcaagcct

SEQ ID NO: 1791 - protein, 15 aa, Artificial Sequence
  CD28 hinge region (811-855)
KHLCPSPLFPGPSKP

SEQ ID NO: 1792 - DNA, 81 bp, Artificial Sequence
  CD28 transmembrane domain (856-936)
ttctgggtcctggtggtggtgggcggagtgctggcctgctacagcctgctggtgaccgtggcctttatcatcttctgggtg

SEQ ID NO: 1793 - protein, 27 aa, Artificial Sequence
  CD28 transmembrane domain (856-936)
FWVLVVVGGVLACYSLLVTVAFIIFWV

SEQ ID NO: 1794 - DNA, 123 bp, Artificial Sequence; identical to SEQ ID NO: 1697
  CD28 (937-1059)

SEQ ID NO: 1795 - protein, 41 aa, Artificial Sequence; identical to SEQ ID NO: 378
  CD28 (937-1059)

SEQ ID NO: 1796 - DNA, 342 bp, Artificial Sequence; identical to SEQ ID NO: 1698
  CD3 zeta 1XX

SEQ ID NO: 1797 - protein, 112 aa, Artificial Sequence
  CD3 zeta 1XX
RVKFSRSADAPAYKQGQNQLYNELNLGRREEYDVLDKRRGRDPEMGGKPRRKNPQEGLFNELQKDKMAEAFSEIGMKGERRRGKGHDGLFQGLSTATKDTFDALHMQALPPR

SEQ ID NO: 1798 - DNA, 1398 bp, Artificial Sequence
  h20A10N CD28 1XX (CD28 h/tm)
atggccttaccagtgaccgccttgctcctgccgctggccttgctgctccacgccgccaggccgcaggtgcagctggttgaatctggcggcggacttgtgaagcctggcggatctctgagactgagctgtgccgccagcggcttcacctttagcacatacgccatgagctggatcagacaggcccctggcaaaggcctggaatgggtggcgtctattggcagagccggcagcacctactacagcgactctgtgaagggcagattcaccatcagccgggacaacgccaagaacagcctgtacctgcagatgaactccctgagagccgaggacaccgccgtgtactattgtgccagaggacccatctacaacgactacgacgagttcgcctattggggccagggcacactggtcacagtttctagcggcggtggcggaagcggaggcggtggctccggtggcggaggcagcgaaattgtgctgacacagagccccgccacactgtcactttctccaggcgaaagagccacactgagctgcaagagcagccagagcgtgctgtactccagcaaccagaagaactacctggcctggtatcagcagaagcccggccaagctcctcggctgctgatctattgggccagcacaagagagagcggcatccctgccagattttctggcagcggctctggcaccgatttcaccctgaccataagcagcctggaacctgaggacttcgccgtgtattactgccaccagtacctgagcagcctgacctttggcggaggcaccaaggtggaaatcaagcggaagcacctgtgtccttctccactgttccccggccctagcaagcctttctgggtcctggtggtggtgggcggagtgctggcctgctacagcctgctggtgaccgtggcctttatcatcttctgggtgaggagtaagaggagcaggctcctgcacagtgactacatgaacatgactcctagaagacctgggcctaccagaaagcattaccagccctatgccccaccacgcgacttcgcagcctatcgctccagagtgaagttcagcaggagcgcagacgcccccgcgtacaagcagggccagaaccagctctataacgagctcaatctaggacgaagagaggagtacgatgttttggacaagagacgtggccgggaccctgagatggggggaaagccgagaaggaagaaccctcaggaaggcctgttcaatgaactgcagaaagataagatggcggaggccttcagtgagattgggatgaaaggcgagcgccggaggggcaaggggcacgatggccttttccagggtctcagtacagccaccaaggacaccttcgacgcccttcacatgcaggccctgccccctcgctgataa

SEQ ID NO: 1799 - protein, 464 aa, Artificial Sequence
  h20A10N CD28 1XX (CD28 h/tm)
MALPVTALLLPLALLLHAARPQVQLVESGGGLVKPGGSLRLSCAASGFTFSTYAMSWIRQAPGKGLEWVASIGRAGSTYYSDSVKGRFTISRDNAKNSLYLQMNSLRAEDTAVYYCARGPIYNDYDEFAYWGQGTLVTVSSGGGGSGGGGSGGGGSEIVLTQSPATLSLSPGERATLSCKSSQSVLYSSNQKNYLAWYQQKPGQAPRLLIYWASTRESGIPARFSGSGSGTDFTLTISSLEPEDFAVYYCHQYLSSLTFGGGTKVEIKRKHLCPSPLFPGPSKPFWVLVVVGGVLACYSLLVTVAFIIFWVRSKRSRLLHSDYMNMTPRRPGPTRKHYQPYAPPRDFAAYRSRVKFSRSADAPAYKQGQNQLYNELNLGRREEYDVLDKRRGRDPEMGGKPRRKNPQEGLFNELQKDKMAEAFSEIGMKGERRRGKGHDGLFQGLSTATKDTFDALHMQALPPR

SEQ ID NO: 1800 - DNA, 63 bp, Artificial Sequence; identical to SEQ ID NO: 1676
  CD8 leader sequence

SEQ ID NO: 1801 - protein, 21 aa, Artificial Sequence
  CD8 leader sequence
MALPVTALLLPLALLLHAARP

SEQ ID NO: 1802 - DNA, 744 bp, Artificial Sequence; identical to SEQ ID NO: 1580
  h20A10N scFV

SEQ ID NO: 1803 - protein, 249 aa, Artificial Sequence; identical to SEQ ID NO: 239
  h20A10N scFV

SEQ ID NO: 1804 - DNA, 45 bp, Artificial Sequence; identical to SEQ ID NO: 1790
  CD28 hinge region (811-855)

SEQ ID NO: 1805 - protein, 15 aa, Artificial Sequence
  CD28 hinge region (811-855)
KHLCPSPLFPGPSKP

SEQ ID NO: 1806 - DNA, 81 bp, Artificial Sequence; identical to SEQ ID NO: 1792
  CD28 transmembrane domain (856-936)

SEQ ID NO: 1807 - protein, 27 aa, Artificial Sequence
  CD28 transmembrane domain (856-936)
FWVLVVVGGVLACYSLLVTVAFIIFWV

SEQ ID NO: 1808 - DNA, 123 bp, Artificial Sequence; identical to SEQ ID NO: 1697
  CD28 (937-1059)

SEQ ID NO: 1809 - protein, 41 aa, Artificial Sequence; identical to SEQ ID NO: 378
  CD28 (937-1059)

SEQ ID NO: 1810 - DNA, 342 bp, Artificial Sequence; identical to SEQ ID NO: 1698
  CD3 zeta 1XX

SEQ ID NO: 1811 - protein, 112 aa, Artificial Sequence; identical to SEQ ID NO: 1797
  CD3 zeta 1XX

SEQ ID NO: 1812 - DNA, 741 bp, Artificial Sequence
  Humanized 3C2B1 scFv sequence
gaggtgcagctggtggaatccggcggaggactcgtgaagcccggcggcagcctgcggctgagctgcgccgcttctggcatcaccttcagcacctacaccatgagctgggtcagacaggcccctggcaagggcctggaatgggtggccacaatctctacaggcggagataagacctactacagcgacagcgtgaaaggcagattcaccatctctagagataatgccaagaacaccctgtacctgcaaatgaacagcctgcgggccgaggacaccgccgtgtactattgtgctagaggcacaacagccatgtactactacgccatggactactggggccagggcacaaccgtgaccgtgtccagcggcggtggcggaagcggaggcggtggctccggtggcggaggcagcgatatcgtgctgacccagagccctgcttctctggccgtgtccccaggccagcgggccacaatcacctgtagagccagcaagtccatcagcaccagcgactacaactacatccactggtatcagcagaaacctggccaacctcctaagctgctcatctacctggccagcaacctggaaagcggcgtgcccgccagattcagcggatctggctctggcaccgacttcaccctgacaattagccccgtcgaggccgaggacgccgccacctactactgccagcacagcagagagctgcctctgacctttggcggcggaacaaaggtggaaatcaag

SEQ ID NO: 1813 - protein, 247 aa, Artificial Sequence
  Humanized 3C2B1 scFv sequence
EVQLVESGGGLVKPGGSLRLSCAASGITFSTYTMSWVRQAPGKGLEWVATISTGGDKTYYSDSVKGRFTISRDNAKNTLYLQMNSLRAEDTAVYYCARGTTAMYYYAMDYWGQGTTVTVSSGGGGSGGGGSGGGGSDIVLTQSPASLAVSPGQRATITCRASKSISTSDYNYIHWYQQKPGQPPKLLIYLASNLESGVPARFSGSGSGTDFTLTISPVEAEDAATYYCQHSRELPLTFGGGTKVEIK

SEQ ID NO: 1814 - DNA, 735 bp, Artificial Sequence
  Humanized 5C6F3 scFv sequence
gaggtgcagctggtggaaagcggcggcggactggtgaaacccggcggcagcctgagactctcttgtgccgccagcggatttacattcagcacctacgccatgagctgggtgcggcaggcccctggcaagggcctggaatgggtcgccgctatctccaacggcggaggctacacctactatcctgattctctgaagggcaggttcaccatcagcagagataacagcaagaataccctgtacctgcaaatgaactctctgcgggccgaggacaccgccgtgtactactgcgctagaagatactacgaccactacttcgactactggggccagggcacactggtgacagtgtccagcggcggtggcggaagcggaggcggtggctccggtggcggaggcagcgatatcgtgatgacccaatctcctagcagcctgagcgtgtccccaggcgagcgggccagcatcagctgtagaagctcccagaccatcgtgcacagcaacggcaacacctacctggaatggtatcagcagaaacctggccagagccccaagctgctgatctacaaggtgtctaatagattcagcggcgtgcctgatagatttagcggatctggctccggcacagacttcaccctgacaatttctggagttgaggccgaggacgtgggcgtctactactgcttccaggacagccacgtgcccctgaccttcggcggcggaacaaaggtggaaatcaag

SEQ ID NO: 1815 - protein, 245 aa, Artificial Sequence
  Humanized 5C6F3 scFv sequence
EVQLVESGGGLVKPGGSLRLSCAASGFTFSTYAMSWVRQAPGKGLEWVAAISNGGGYTYYPDSLKGRFTISRDNSKNTLYLQMNSLRAEDTAVYYCARRYYDHYFDYWGQGTLVTVSSGGGGSGGGGSGGGGSDIVMTQSPSSLSVSPGERASISCRSSQTIVHSNGNTYLEWYQQKPGQSPKLLIYKVSNRFSGVPDRFSGSGSGTDFTLTISGVEAEDVGVYYCFQDSHVPLTFGGGTKVEIK

SEQ ID NO: 1816 - DNA, 354 bp, Artificial Sequence
  Mouse antibody 5C6F3 Heavy chain sequence Signal peptide-FR1-CDR1-FR2-CDR2-FR3-CDR3-FR4
gaagtgatgctggtggagtctgggggaggcttagtgaagcctggagggtccctgaaactctcctgtgcagcctctggattcactttcagtacctatgccatgtcttgggttcgccagactccggagaagaggctggagtgggtcgcagccattagtaatggtggtggttacacctactatccagacagtctgaaggggcgattcaccatctccagagacaatgccaagaacaccctgtacctgcaaatgagcagtctgaggtctgaggacacggccacgtattactgtgcaagacgttactatgatcactactttgactactggggccaaggcaccgctctcacggtctcctca

SEQ ID NO: 1817 - protein, 118 aa, Artificial Sequence
  Mouse antibody 5C6F3 Heavy chain sequence Signal peptide-FR1-CDR1-FR2-CDR2-FR3-CDR3-FR4
EVMLVESGGGLVKPGGSLKLSCAASGFTFSTYAMSWVRQTPEKRLEWVAAISNGGGYTYYPDSLKGRFTISRDNAKNTLYLQMSSLRSEDTATYYCARRYYDHYFDYWGQGTALTVSS

SEQ ID NO: 1818 - DNA, 336 bp, Artificial Sequence
  Mouse antibody 5C6F3 Light chain sequence Signal peptide-FR1-CDR1-FR2-CDR2-FR3-CDR3-FR4
gatgttttgatgacccaaactccactctccctgcctgtcagtcttggagatcaagcctccatctcttgcagatctagtcagaccattgtacatagtaatggaaacacctatttagaatggtacctgcagaaaccaggccagtctccaaagctcctgatctacaaagtttccaaccgattttctggggtcccagacaggttcagtggcagtggatcagggacagatttcacactcaagatcagcagggtggaggctgaggatctgggagtttattactgctttcaagattcacatgttcctctcacgttcggtgctgggaccaagctggagctgaaa

SEQ ID NO: 1819 - protein, 112 aa, Artificial Sequence
  Mouse antibody 5C6F3 Light chain sequence Signal peptide-FR1-CDR1-FR2-CDR2-FR3-CDR3-FR4
DVLMTQTPLSLPVSLGDQASISCRSSQTIVHSNGNTYLEWYLQKPGQSPKLLIYKVSNRFSGVPDRFSGSGSGTDFTLKISRVEAEDLGVYYCFQDSHVPLTFGAGTKLELK

SEQ ID NO: 1820 - DNA, 363 bp, Artificial Sequence
  Mouse antibody 3C2B1 Heavy chain sequence Signal peptide-FR1-CDR1-FR2-CDR2-FR3-CDR3-FR4
gaagtgatgctggtggagtctgggggaggcttagtgaagcctggagggtccctgaaactctcctgtgcagcctctggaatcactttcagtacctataccatgtcgtgggttcgccagactccggagaagaggctggagtgggtcgcaaccattagtactggtggtgataaaacctactattcagacagtgtgaagggtcgattcaccatctccagagacaatgccaagaacaacctgtacctccaaatgagcagtctgaggtctgaggacacggccttgtattactgtgcaaggggaaccacggctatgtattactatgctatggactactggggtcaaggaacctcagtcaccgtctcctca

SEQ ID NO: 1821 - protein, 121 aa, Artificial Sequence
  Mouse antibody 3C2B1 Heavy chain sequence Signal peptide-FR1-CDR1-FR2-CDR2-FR3-CDR3-FR4
EVMLVESGGGLVKPGGSLKLSCAASGITFSTYTMSWVRQTPEKRLEWVATISTGGDKTYYSDSVKGRFTISRDNAKNNLYLQMSSLRSEDTALYYCARGTTAMYYYAMDYWGQGTSVTVSS

SEQ ID NO: 1822 - DNA, 332 bp, Artificial Sequence
  Mouse antibody 3C2B1 Light chain sequence Signal peptide-FR1-CDR1-FR2-CDR2-FR3-CDR3-FR4
gacattgtgctgacacagtctcctgcttccttagctgtatctctggggcagagggccaccatctcatgcagggccagcaaaagtatcagtacatctgactataattatattcactggtaccaacagaaaccaggacagccacccaaactcctcatctatcttgcatccaacctagaatctgggtccctgccaggttcagtggcagtgggtctgggacagacttcaccctcaacatccatcctgtggaggaagaagatgctgcaacctattactgtcagcacagtagggagcttcctctcacgttcggtgctgggaccaagctggagctgaaa

SEQ ID NO: 1823 - protein, 111 aa, Artificial Sequence
  Mouse antibody 3C2B1 Light chain sequence Signal peptide-FR1-CDR1-FR2-CDR2-FR3-CDR3-FR4
DIVLTQSPASLAVSLGQRATISCRASKSISTSDYNYIHWYQQKPGQPPKLLIYLASNLESGVPARFSGSGSGTDFTLNIHPVEEEDAATYYCQHSRELPLTFGAGTKLELK

SEQ ID NO: 1824 - DNA, 744 bp, Artificial Sequence
  hu20A10MR scFV
gaggtgcagctggttgaatctggcggcggacttgtgaagcctggcggatctctgagactgagctgtgccgccagcggcttcacctttagcacatacgccatgagctgggtccgacaggcccctggaaaaggccttgaatgggttgcctctatcggcagagccggcagcacctactacagcgattctgtgaagggcagattcaccatcagccgggacaacgccaagaacagcctgtacctgcagatgaactccctgagagccgaggacaccgccgtgtactattgtgccagaggacccatctacaacgactacgacgagttcgcctattggggccagggcacactggtcacagtcagctctggcggtggcggaagcggaggcggtggctccggtggcggaggcagcgacatcgtgatgacacagagcccttctagcctggccgtgtctctgggagagagagccacaatcagctgcaagagcagccagagcgtgctgtactccagcaaccagaagaactacctggcctggtatcagcagaagcccggacagtctcccaagctgctgatctactgggccagcaccagagaaagcggcgtgcccgatagattcacaggctctggcagcggcaccgacttcaccctgacaattagcagtctgcaggccgaggacgtggccgtgtactactgtcaccagtacctgagcagcctgacctttggcggcggaacaaaggtggaaatcaagaga

SEQ ID NO: 1825 - protein, 248 aa, Artificial Sequence
  hu20A10MR scFV
EVQLVESGGGLVKPGGSLRLSCAASGFTFSTYAMSWVRQAPGKGLEWVASIGRAGSTYYSDSVKGRFTISRDNAKNSLYLQMNSLRAEDTAVYYCARGPIYNDYDEFAYWGQGTLVTVSSGGGGSGGGGSGGGGSDIVMTQSPSSLAVSLGERATISCKSSQSVLYSSNQKNYLAWYQQKPGQSPKLLIYWASTRESGVPDRFTGSGSGTDFTLTISSLQAEDVAVYYCHQYLSSLTFGGGTKVEIKR

SEQ ID NO: 1826 - DNA, 747 bp, Artificial Sequence
  hu20A10MRT scFV
gaggtgcagctggttgaatctggcggcggacttgtgaagcctggcggatctctgagactgagctgtgccgccagcggcttcacctttagcacatacgccatgagctgggtccgacaggcccctggaaaaggccttgaatgggttgcctctatcggcagagccggcagcacctactacagcgattctgtgaagggcagattcaccatcagccgggacaacgccaagaacagcctgtacctgcagatgaactccctgagagccgaggacaccgccgtgtactattgtgccagaggacccatctacaacgactacgacgagttcgcctattggggccagggcacactggtcacagtcagctctggcggtggcggaagcggaggcggtggctccggtggcggaggcagcgacatcgtgatgacacagagcccttctagcctggccgtgtctctgggagagagagccacaatcagctgcaagagcagccagagcgtgctgtactccagcaaccagaagaactacctggcctggtatcagcagaagcccggacagtctcccaagctgctgatctactgggccagcaccagagaaagcggcgtgcccgatagattcacaggctctggcagcggcaccgacttcaccctgacaattagcagtctgcaggccgaggacgtggccgtgtactactgtcaccagtacctgagcagcctgacctttggcggcggaacaaaggtggaaatcaagagaacc

SEQ ID NO: 1827 - protein, 249 aa, Artificial Sequence
  hu20A10MRT scFV
EVQLVESGGGLVKPGGSLRLSCAASGFTFSTYAMSWVRQAPGKGLEWVASIGRAGSTYYSDSVKGRFTISRDNAKNSLYLQMNSLRAEDTAVYYCARGPIYNDYDEFAYWGQGTLVTVSSGGGGSGGGGSGGGGSDIVMTQSPSSLAVSLGERATISCKSSQSVLYSSNQKNYLAWYQQKPGQSPKLLIYWASTRESGVPDRFTGSGSGTDFTLTISSLQAEDVAVYYCHQYLSSLTFGGGTKVEIKRT

SEQ ID NO: 1828 - DNA, 741 bp, Artificial Sequence
  hu20A10C2-R scFV
gaggtgcagctggttgaatctggcggcggacttgtgaagcctggcggatctctgagactgagctgtgccgccagcggcttcacctttagcacatacgccatgagctgggtccgacaggcccctggaaaaggccttgaatgggttgcctctatcggcagagccggcagcacctactacagcgattctgtgaagggcagattcaccatcagccgggacaacgccaagaacagcctgtacctgcagatgaactccctgagagccgaggacaccgccgtgtactattgtgccagaggacccatctacaacgactacgacgagttcgcctattggggccagggcacactggtcacagtcagctctggcggtggcggaagcggaggcggtggctccggtggcggaggcagcgacattgtgctgacccagtctccagcctccttggccgtgtctccaggacagagggccaccatcacctgcaagagcagccagagcgtgctgtactccagcaaccagaagaactacctggcctggtatcagcagaaaccaggacaacctcctaaactcctgatttactgggccagcaccagagaaagcggggtcccagccaggttcagcggcagtgggtctgggaccgatttcaccctcacaattaatcctgtggaagctaatgatactgcaaattattactgtcaccagtacctgagcagcctgaccttcggcggagggaccaaggtggagatcaaa

SEQ ID NO: 1829 - protein, 247 aa, Artificial Sequence
  hu20A10C2-R scFV
EVQLVESGGGLVKPGGSLRLSCAASGFTFSTYAMSWVRQAPGKGLEWVASIGRAGSTYYSDSVKGRFTISRDNAKNSLYLQMNSLRAEDTAVYYCARGPIYNDYDEFAYWGQGTLVTVSSGGGGSGGGGSGGGGSDIVLTQSPASLAVSPGQRATITCKSSQSVLYSSNQKNYLAWYQQKPGQPPKLLIYWASTRESGVPARFSGSGSGTDFTLTINPVEANDTANYYCHQYLSSLTFGGGTKVEIK

SEQ ID NO: 1830 - DNA, 747 bp, Artificial Sequence
  hu20A10C2RT scFV
gaggtgcagctggttgaatctggcggcggacttgtgaagcctggcggatctctgagactgagctgtgccgccagcggcttcacctttagcacatacgccatgagctgggtccgacaggcccctggaaaaggccttgaatgggttgcctctatcggcagagccggcagcacctactacagcgattctgtgaagggcagattcaccatcagccgggacaacgccaagaacagcctgtacctgcagatgaactccctgagagccgaggacaccgccgtgtactattgtgccagaggacccatctacaacgactacgacgagttcgcctattggggccagggcacactggtcacagtcagctctggcggtggcggaagcggaggcggtggctccggtggcggaggcagcgacattgtgctgacccagtctccagcctccttggccgtgtctccaggacagagggccaccatcacctgcaagagcagccagagcgtgctgtactccagcaaccagaagaactacctggcctggtatcagcagaaaccaggacaacctcctaaactcctgatttactgggccagcaccagagaaagcggggtcccagccaggttcagcggcagtgggtctgggaccgatttcaccctcacaattaatcctgtggaagctaatgatactgcaaattattactgtcaccagtacctgagcagcctgaccttcggcggagggaccaaggtggagatcaaacgaacc

SEQ ID NO: 1831 - protein, 249 aa, Artificial Sequence
  hu20A10C2RT scFV
EVQLVESGGGLVKPGGSLRLSCAASGFTFSTYAMSWVRQAPGKGLEWVASIGRAGSTYYSDSVKGRFTISRDNAKNSLYLQMNSLRAEDTAVYYCARGPIYNDYDEFAYWGQGTLVTVSSGGGGSGGGGSGGGGSDIVLTQSPASLAVSPGQRATITCKSSQSVLYSSNQKNYLAWYQQKPGQPPKLLIYWASTRESGVPARFSGSGSGTDFTLTINPVEANDTANYYCHQYLSSLTFGGGTKVEIKRT

SEQ ID NO: 1832 - DNA, 741 bp, Artificial Sequence
  hu20A10N-R scFV
caggtgcagctggttgaatctggcggcggacttgtgaagcctggcggatctctgagactgagctgtgccgccagcggcttcacctttagcacatacgccatgagctggatcagacaggcccctggcaaaggcctggaatgggtggcgtctattggcagagccggcagcacctactacagcgactctgtgaagggcagattcaccatcagccgggacaacgccaagaacagcctgtacctgcagatgaactccctgagagccgaggacaccgccgtgtactattgtgccagaggacccatctacaacgactacgacgagttcgcctattggggccagggcacactggtcacagtttctagcggcggtggcggaagcggaggcggtggctccggtggcggaggcagcgaaattgtgctgacacagagccccgccacactgtcactttctccaggcgaaagagccacactgagctgcaagagcagccagagcgtgctgtactccagcaaccagaagaactacctggcctggtatcagcagaagcccggccaagctcctcggctgctgatctattgggccagcacaagagagagcggcatccctgccagattttctggcagcggctctggcaccgatttcaccctgaccataagcagcctggaacctgaggacttcgccgtgtattactgccaccagtacctgagcagcctgacctttggcggaggcaccaaggtggaaatcaag

SEQ ID NO: 1833 - protein, 247 aa, Artificial Sequence
  hu20A10N-R scFV
QVQLVESGGGLVKPGGSLRLSCAASGFTFSTYAMSWIRQAPGKGLEWVASIGRAGSTYYSDSVKGRFTISRDNAKNSLYLQMNSLRAEDTAVYYCARGPIYNDYDEFAYWGQGTLVTVSSGGGGSGGGGSGGGGSEIVLTQSPATLSLSPGERATLSCKSSQSVLYSSNQKNYLAWYQQKPGQAPRLLIYWASTRESGIPARFSGSGSGTDFTLTISSLEPEDFAVYYCHQYLSSLTFGGGTKVEIK

SEQ ID NO: 1834 - DNA, 747 bp, Artificial Sequence
  hu20A10NRT scFV
caggtgcagctggttgaatctggcggcggacttgtgaagcctggcggatctctgagactgagctgtgccgccagcggcttcacctttagcacatacgccatgagctggatcagacaggcccctggcaaaggcctggaatgggtggcgtctattggcagagccggcagcacctactacagcgactctgtgaagggcagattcaccatcagccgggacaacgccaagaacagcctgtacctgcagatgaactccctgagagccgaggacaccgccgtgtactattgtgccagaggacccatctacaacgactacgacgagttcgcctattggggccagggcacactggtcacagtttctagcggcggtggcggaagcggaggcggtggctccggtggcggaggcagcgaaattgtgctgacacagagccccgccacactgtcactttctccaggcgaaagagccacactgagctgcaagagcagccagagcgtgctgtactccagcaaccagaagaactacctggcctggtatcagcagaagcccggccaagctcctcggctgctgatctattgggccagcacaagagagagcggcatccctgccagattttctggcagcggctctggcaccgatttcaccctgaccataagcagcctggaacctgaggacttcgccgtgtattactgccaccagtacctgagcagcctgacctttggcggaggcaccaaggtggaaatcaagcggacc

SEQ ID NO: 1835 - protein, 249 aa, Artificial Sequence
  hu20A10NRT scFV
QVQLVESGGGLVKPGGSLRLSCAASGFTFSTYAMSWIRQAPGKGLEWVASIGRAGSTYYSDSVKGRFTISRDNAKNSLYLQMNSLRAEDTAVYYCARGPIYNDYDEFAYWGQGTLVTVSSGGGGSGGGGSGGGGSEIVLTQSPATLSLSPGERATLSCKSSQSVLYSSNQKNYLAWYQQKPGQAPRLLIYWASTRESGIPARFSGSGSGTDFTLTISSLEPEDFAVYYCHQYLSSLTFGGGTKVEIKRT

SEQ ID NO: 1836 - DNA, 732 bp, Artificial Sequence
  huMNE6+R scFV
gaggtgcagctggtggagtctgggggaggcctggtcaagcctggggggtccctgagactctcctgtgcagcctctggattcaccttcagtaggtatggcatgagctgggtccgccaggctccagggaagaggctggagtgggtctcaaccattagtggcggaggcacctacatatactacccagactcagtgaagggccgattcaccatctccagagacaacgccaagaacaccctgtatctgcaaatgaacagcctgagagccgaggacacggctgtgtattactgtaccagagataactatggccgcaactatgattatggcatggattattggggccagggcaccctggtgaccgtgagcagcggcggtggcggatccggcggtggcggatccggcggtggcggatccgaaattgtgttgacacagtctccagccaccctgtctttgtctccaggggaaagagccaccctcacctgcagcgccaccagcagtgttagctacatccactggtaccaacagaggcctggccagagccccaggctcctcatctatagcacctccaacctggccagcggcatcccagccaggttcagtggcagtgggtctgggagcgactacactctcaccatcagcagcctagagcctgaagattttgcagtttattactgtcagcagcgtagcagctcccctttcacctttggcagcggcaccaaagtggaaattaaaaga

SEQ ID NO: 1837 - protein, 244 aa, Artificial Sequence
  huMNE6+R scFV
EVQLVESGGGLVKPGGSLRLSCAASGFTFSRYGMSWVRQAPGKRLEWVSTISGGGTYIYYPDSVKGRFTISRDNAKNTLYLQMNSLRAEDTAVYYCTRDNYGRNYDYGMDYWGQGTLVTVSSGGGGSGGGGSGGGGSEIVLTQSPATLSLSPGERATLTCSATSSVSYIHWYQQRPGQSPRLLIYSTSNLASGIPARFSGSGSGSDYTLTISSLEPEDFAVYYCQQRSSSPFTFGSGTKVEIKR

SEQ ID NO: 1838 - DNA, 735 bp, Artificial Sequence
  huMNE6+RT scFV
gaggtgcagctggtggagtctgggggaggcctggtcaagcctggggggtccctgagactctcctgtgcagcctctggattcaccttcagtaggtatggcatgagctgggtccgccaggctccagggaagaggctggagtgggtctcaaccattagtggcggaggcacctacatatactacccagactcagtgaagggccgattcaccatctccagagacaacgccaagaacaccctgtatctgcaaatgaacagcctgagagccgaggacacggctgtgtattactgtaccagagataactatggccgcaactatgattatggcatggattattggggccagggcaccctggtgaccgtgagcagcggcggtggcggatccggcggtggcggatccggcggtggcggatccgaaattgtgttgacacagtctccagccaccctgtctttgtctccaggggaaagagccaccctcacctgcagcgccaccagcagtgttagctacatccactggtaccaacagaggcctggccagagccccaggctcctcatctatagcacctccaacctggccagcggcatcccagccaggttcagtggcagtgggtctgggagcgactacactctcaccatcagcagcctagagcctgaagattttgcagtttattactgtcagcagcgtagcagctcccctttcacctttggcagcggcaccaaagtggaaattaaaagaacc

SEQ ID NO: 1839 - protein, 245 aa, Artificial Sequence
  huMNE6+RT scFV
EVQLVESGGGLVKPGGSLRLSCAASGFTFSRYGMSWVRQAPGKRLEWVSTISGGGTYIYYPDSVKGRFTISRDNAKNTLYLQMNSLRAEDTAVYYCTRDNYGRNYDYGMDYWGQGTLVTVSSGGGGSGGGGSGGGGSEIVLTQSPATLSLSPGERATLTCSATSSVSYIHWYQQRPGQSPRLLIYSTSNLASGIPARFSGSGSGSDYTLTISSLEPEDFAVYYCQQRSSSPFTFGSGTKVEIKRT

SEQ ID NO: 1840 - DNA, 744 bp, Artificial Sequence
  huMNC2-T scFV
gaggtgcagctggtggagtctgggggaggcctggtcaagcctggggggtccctgagactctcctgtgcagcctctggattcaccttcagtggctatgccatgagctgggtccgccaggctccagggaaggggctggagtgggtctcaaccattagtagtggcggaacctacatatactaccccgactcagtgaagggccgattcaccatctccagagacaacgccaagaactcactgtatctgcaaatgaacagcctgagagccgaggacacggccgtgtattactgtgcgagacttgggggggataattactacgaatacttcgatgtctggggcaaagggaccacggtcaccgtctcctccggcggtggcggatccggcggtggcggatccggcggtggcggatccgacattgtgctgacccagtctccagcctccttggccgtgtctccaggacagagggccaccatcacctgcagagccagtaagagtgtcagtaccagcggatactcctacatgcactggtatcagcagaaaccaggacaacctcctaaactcctgatttacctggcatccaatctggagagcggggtcccagccaggttcagcggcagtgggtctgggaccgatttcaccctcacaattaatcctgtggaagctaatgatactgcaaattattactgtcagcacagtagggagctgcctttcacattcggcggagggaccaaggtggagatcaaacga

SEQ ID NO: 1841 - protein, 248 aa, Artificial Sequence
  huMNC2-T scFV
EVQLVESGGGLVKPGGSLRLSCAASGFTFSGYAMSWVRQAPGKGLEWVSTISSGGTYIYYPDSVKGRFTISRDNAKNSLYLQMNSLRAEDTAVYYCARLGGDNYYEYFDVWGKGTTVTVSSGGGGSGGGGSGGGGSDIVLTQSPASLAVSPGQRATITCRASKSVSTSGYSYMHWYQQKPGQPPKLLIYLASNLESGVPARFSGSGSGTDFTLTINPVEANDTANYYCQHSRELPFTFGGGTKVEIKR

SEQ ID NO: 1842 - DNA, 741 bp, Artificial Sequence
  huMNC2-RT scFV
gaggtgcagctggtggagtctgggggaggcctggtcaagcctggggggtccctgagactctcctgtgcagcctctggattcaccttcagtggctatgccatgagctgggtccgccaggctccagggaaggggctggagtgggtctcaaccattagtagtggcggaacctacatatactaccccgactcagtgaagggccgattcaccatctccagagacaacgccaagaactcactgtatctgcaaatgaacagcctgagagccgaggacacggccgtgtattactgtgcgagacttgggggggataattactacgaatacttcgatgtctggggcaaagggaccacggtcaccgtctcctccggcggtggcggatccggcggtggcggatccggcggtggcggatccgacattgtgctgacccagtctccagcctccttggccgtgtctccaggacagagggccaccatcacctgcagagccagtaagagtgtcagtaccagcggatactcctacatgcactggtatcagcagaaaccaggacaacctcctaaactcctgatttacctggcatccaatctggagagcggggtcccagccaggttcagcggcagtgggtctgggaccgatttcaccctcacaattaatcctgtggaagctaatgatactgcaaattattactgtcagcacagtagggagctgcctttcacattcggcggagggaccaaggtggagatcaaa

SEQ ID NO: 1843 - protein, 247 aa, Artificial Sequence
  huMNC2-RT scFV
EVQLVESGGGLVKPGGSLRLSCAASGFTFSGYAMSWVRQAPGKGLEWVSTISSGGTYIYYPDSVKGRFTISRDNAKNSLYLQMNSLRAEDTAVYYCARLGGDNYYEYFDVWGKGTTVTVSSGGGGSGGGGSGGGGSDIVLTQSPASLAVSPGQRATITCRASKSVSTSGYSYMHWYQQKPGQPPKLLIYLASNLESGVPARFSGSGSGTDFTLTINPVEANDTANYYCQHSRELPFTFGGGTKVEIK

SEQ ID NO: 1844 - DNA, 1395 bp, Artificial Sequence
  mu20A10-CAR T-28-28-3z
atggccttaccagtgaccgccttgctcctgccgctggccttgctgctccacgccgccaggccggaagtgatgctggtggaatctggcggcggactggttaagcctggcggatctctgaagctgagctgtgccgccagcggcttcacctttagcacatacgccatgagctggatccggcagacccctgagaagagactggaatgggttgccagcatcggcagagccggcagcacctactacagcgattctgtgaagggcagattcaccatcagccgggacaacgtgcggaacatcctgtacctgcagatgagcagcctgcggagcgaggataccgccatgtactactgtgccagaggacccatctacaacgactacgacgagttcgcctattggggccagggcacactggttacagtttctgctggtggcggaggatctggcggaggtggaagcggcggaggcggatccaatatcatgatgacacagagcccgagcagcctggctgtgtctgctggcgagaaagtgaccatgtcctgcaagagcagccagagcgtgctgtactccagcaaccagaagaactacctggcctggtatcagcagaagcccggccagtctcctaagctgctgatctactgggccagcaccagagaaagcggcgtgcccgatagattcacaggcagcggcagcggaaccgacttcaccctgacaatcagctctgtgcaggccgaagatctggccgtgtactattgccaccagtacctgtccagcctgacctttggcgccggaacaaagctggaactgaagaagcacctgtgtccttctccactgttccccggccctagcaagcctttctgggtcctggtggtggtgggcggagtgctggcctgctacagcctgctggtgaccgtggcctttatcatcttctgggtgaggagtaagaggagcaggctcctgcacagtgactacatgaacatgactcctagaagacctgggcctaccagaaagcattaccagccctatgccccaccacgcgacttcgcagcctatcgctccagagtgaagttcagcaggagcgcagacgcccccgcgtacaagcagggccagaaccagctctataacgagctcaatctaggacgaagagaggagtacgatgttttggacaagagacgtggccgggaccctgagatggggggaaagccgagaaggaagaaccctcaggaaggcctgtacaatgaactgcagaaagataagatggcggaggcctacagtgagattgggatgaaaggcgagcgccggaggggcaaggggcacgatggcctttaccagggtctcagtacagccaccaaggacacctacgacgcccttcacatgcaggccctgccccctcgctgataa

SEQ ID NO: 1845 - protein, 463 aa, Artificial Sequence
  mu20A10-CAR T-28-28-3z
MALPVTALLLPLALLLHAARPEVMLVESGGGLVKPGGSLKLSCAASGFTFSTYAMSWIRQTPEKRLEWVASIGRAGSTYYSDSVKGRFTISRDNVRNILYLQMSSLRSEDTAMYYCARGPIYNDYDEFAYWGQGTLVTVSAGGGGSGGGGSGGGGSNIMMTQSPSSLAVSAGEKVTMSCKSSQSVLYSSNQKNYLAWYQQKPGQSPKLLIYWASTRESGVPDRFTGSGSGTDFTLTISSVQAEDLAVYYCHQYLSSLTFGAGTKLELKKHLCPSPLFPGPSKPFWVLVVVGGVLACYSLLVTVAFIIFWVRSKRSRLLHSDYMNMTPRRPGPTRKHYQPYAPPRDFAAYRSRVKFSRSADAPAYKQGQNQLYNELNLGRREEYDVLDKRRGRDPEMGGKPRRKNPQEGLYNELQKDKMAEAYSEIGMKGERRRGKGHDGLYQGLSTATKDTYDALHMQALPPR

SEQ ID NO: 1846 - DNA, 1398 bp, Artificial Sequence
  hu20A10-CAR T-28-28-3z
atggccttaccagtgaccgccttgctcctgccgctggccttgctgctccacgccgccaggccggaggtgcagctggttgaatctggcggcggacttgtgaagcctggcggatctctgagactgagctgtgccgccagcggcttcacctttagcacatacgccatgagctgggtccgacaggcccctggaaaaggccttgaatgggttgcctctatcggcagagccggcagcacctactacagcgattctgtgaagggcagattcaccatcagccgggacaacgccaagaacagcctgtacctgcagatgaactccctgagagccgaggacaccgccgtgtactattgtgccagaggacccatctacaacgactacgacgagttcgcctattggggccagggcacactggtcacagtcagctctggcggtggcggaagcggaggcggtggctccggtggcggaggcagcgacattgtgctgacccagtctccagcctccttggccgtgtctccaggacagagggccaccatcacctgcaagagcagccagagcgtgctgtactccagcaaccagaagaactacctggcctggtatcagcagaaaccaggacaacctcctaaactcctgatttactgggccagcaccagagaaagcggggtcccagccaggttcagcggcagtgggtctgggaccgatttcaccctcacaattaatcctgtggaagctaatgatactgcaaattattactgtcaccagtacctgagcagcctgaccttcggcggagggaccaaggtggagatcaaacgaaagcacctgtgtccttctccactgttccccggccctagcaagcctttctgggtcctggtggtggtgggcggagtgctggcctgctacagcctgctggtgaccgtggcctttatcatcttctgggtgaggagtaagaggagcaggctcctgcacagtgactacatgaacatgactcctagaagacctgggcctaccagaaagcattaccagccctatgccccaccacgcgacttcgcagcctatcgctccagagtgaagttcagcaggagcgcagacgcccccgcgtacaagcagggccagaaccagctctataacgagctcaatctaggacgaagagaggagtacgatgttttggacaagagacgtggccgggaccctgagatggggggaaagccgagaaggaagaaccctcaggaaggcctgtacaatgaactgcagaaagataagatggcggaggcctacagtgagattgggatgaaaggcgagcgccggaggggcaaggggcacgatggcctttaccagggtctcagtacagccaccaaggacacctacgacgcccttcacatgcaggccctgccccctcgctgataa

SEQ ID NO: 1847 - protein, 464 aa, Artificial Sequence
  hu20A10-CAR T-28-28-3z
MALPVTALLLPLALLLHAARPEVQLVESGGGLVKPGGSLRLSCAASGFTFSTYAMSWVRQAPGKGLEWVASIGRAGSTYYSDSVKGRFTISRDNAKNSLYLQMNSLRAEDTAVYYCARGPIYNDYDEFAYWGQGTLVTVSSGGGGSGGGGSGGGGSDIVLTQSPASLAVSPGQRATITCKSSQSVLYSSNQKNYLAWYQQKPGQPPKLLIYWASTRESGVPARFSGSGSGTDFTLTINPVEANDTANYYCHQYLSSLTFGGGTKVEIKRKHLCPSPLFPGPSKPFWVLVVVGGVLACYSLLVTVAFIIFWVRSKRSRLLHSDYMNMTPRRPGPTRKHYQPYAPPRDFAAYRSRVKFSRSADAPAYKQGQNQLYNELNLGRREEYDVLDKRRGRDPEMGGKPRRKNPQEGLYNELQKDKMAEAYSEIGMKGERRRGKGHDGLYQGLSTATKDTYDALHMQALPPR

SEQ ID NO: 1848 - DNA, 1395 bp, Artificial Sequence
  mu20A10-CAR T-28-28-3z-1XX
atggccttaccagtgaccgccttgctcctgccgctggccttgctgctccacgccgccaggccggaagtgatgctggtggaatctggcggcggactggttaagcctggcggatctctgaagctgagctgtgccgccagcggcttcacctttagcacatacgccatgagctggatccggcagacccctgagaagagactggaatgggttgccagcatcggcagagccggcagcacctactacagcgattctgtgaagggcagattcaccatcagccgggacaacgtgcggaacatcctgtacctgcagatgagcagcctgcggagcgaggataccgccatgtactactgtgccagaggacccatctacaacgactacgacgagttcgcctattggggccagggcacactggttacagtttctgctggtggcggaggatctggcggaggtggaagcggcggaggcggatccaatatcatgatgacacagagcccgagcagcctggctgtgtctgctggcgagaaagtgaccatgtcctgcaagagcagccagagcgtgctgtactccagcaaccagaagaactacctggcctggtatcagcagaagcccggccagtctcctaagctgctgatctactgggccagcaccagagaaagcggcgtgcccgatagattcacaggcagcggcagcggaaccgacttcaccctgacaatcagctctgtgcaggccgaagatctggccgtgtactattgccaccagtacctgtccagcctgacctttggcgccggaacaaagctggaactgaagaagcacctgtgtccttctccactgttccccggccctagcaagcctttctgggtcctggtggtggtgggcggagtgctggcctgctacagcctgctggtgaccgtggcctttatcatcttctgggtgaggagtaagaggagcaggctcctgcacagtgactacatgaacatgactcctagaagacctgggcctaccagaaagcattaccagccctatgccccaccacgcgacttcgcagcctatcgctccagagtgaagttcagcaggagcgcagacgcccccgcgtacaagcagggccagaaccagctctataacgagctcaatctaggacgaagagaggagtacgatgttttggacaagagacgtggccgggaccctgagatggggggaaagccgagaaggaagaaccctcaggaaggcctgttcaatgaactgcagaaagataagatggcggaggccttcagtgagattgggatgaaaggcgagcgccggaggggcaaggggcacgatggccttttccagggtctcagtacagccaccaaggacaccttcgacgcccttcacatgcaggccctgccccctcgctgataa

SEQ ID NO: 1849 - protein, 463 aa, Artificial Sequence
  mu20A10-CAR T-28-28-3z-1XX
MALPVTALLLPLALLLHAARPEVMLVESGGGLVKPGGSLKLSCAASGFTFSTYAMSWIRQTPEKRLEWVASIGRAGSTYYSDSVKGRFTISRDNVRNILYLQMSSLRSEDTAMYYCARGPIYNDYDEFAYWGQGTLVTVSAGGGGSGGGGSGGGGSNIMMTQSPSSLAVSAGEKVTMSCKSSQSVLYSSNQKNYLAWYQQKPGQSPKLLIYWASTRESGVPDRFTGSGSGTDFTLTISSVQAEDLAVYYCHQYLSSLTFGAGTKLELKKHLCPSPLFPGPSKPFWVLVVVGGVLACYSLLVTVAFIIFWVRSKRSRLLHSDYMNMTPRRPGPTRKHYQPYAPPRDFAAYRSRVKFSRSADAPAYKQGQNQLYNELNLGRREEYDVLDKRRGRDPEMGGKPRRKNPQEGLFNELQKDKMAEAFSEIGMKGERRRGKGHDGLFQGLSTATKDTFDALHMQALPPR

SEQ ID NO: 1850 - DNA, 1398 bp, Artificial Sequence
  hu20A10-CAR T-28-28-3z-1XX
atggccttaccagtgaccgccttgctcctgccgctggccttgctgctccacgccgccaggccggaggtgcagctggttgaatctggcggcggacttgtgaagcctggcggatctctgagactgagctgtgccgccagcggcttcacctttagcacatacgccatgagctgggtccgacaggcccctggaaaaggccttgaatgggttgcctctatcggcagagccggcagcacctactacagcgattctgtgaagggcagattcaccatcagccgggacaacgccaagaacagcctgtacctgcagatgaactccctgagagccgaggacaccgccgtgtactattgtgccagaggacccatctacaacgactacgacgagttcgcctattggggccagggcacactggtcacagtcagctctggcggtggcggaagcggaggcggtggctccggtggcggaggcagcgacattgtgctgacccagtctccagcctccttggccgtgtctccaggacagagggccaccatcacctgcaagagcagccagagcgtgctgtactccagcaaccagaagaactacctggcctggtatcagcagaaaccaggacaacctcctaaactcctgatttactgggccagcaccagagaaagcggggtcccagccaggttcagcggcagtgggtctgggaccgatttcaccctcacaattaatcctgtggaagctaatgatactgcaaattattactgtcaccagtacctgagcagcctgaccttcggcggagggaccaaggtggagatcaaacgaaagcacctgtgtccttctccactgttccccggccctagcaagcctttctgggtcctggtggtggtgggcggagtgctggcctgctacagcctgctggtgaccgtggcctttatcatcttctgggtgaggagtaagaggagcaggctcctgcacagtgactacatgaacatgactcctagaagacctgggcctaccagaaagcattaccagccctatgccccaccacgcgacttcgcagcctatcgctccagagtgaagttcagcaggagcgcagacgcccccgcgtacaagcagggccagaaccagctctataacgagctcaatctaggacgaagagaggagtacgatgttttggacaagagacgtggccgggaccctgagatggggggaaagccgagaaggaagaaccctcaggaaggcctgttcaatgaactgcagaaagataagatggcggaggccttcagtgagattgggatgaaaggcgagcgccggaggggcaaggggcacgatggccttttccagggtctcagtacagccaccaaggacaccttcgacgcccttcacatgcaggccctgccccctcgctgataa

SEQ ID NO: 1851 - protein, 464 aa, Artificial Sequence
  hu20A10-CAR T-28-28-3z-1XX
MALPVTALLLPLALLLHAARPEVQLVESGGGLVKPGGSLRLSCAASGFTFSTYAMSWVRQAPGKGLEWVASIGRAGSTYYSDSVKGRFTISRDNAKNSLYLQMNSLRAEDTAVYYCARGPIYNDYDEFAYWGQGTLVTVSSGGGGSGGGGSGGGGSDIVLTQSPASLAVSPGQRATITCKSSQSVLYSSNQKNYLAWYQQKPGQPPKLLIYWASTRESGVPARFSGSGSGTDFTLTINPVEANDTANYYCHQYLSSLTFGGGTKVEIKRKHLCPSPLFPGPSKPFWVLVVVGGVLACYSLLVTVAFIIFWVRSKRSRLLHSDYMNMTPRRPGPTRKHYQPYAPPRDFAAYRSRVKFSRSADAPAYKQGQNQLYNELNLGRREEYDVLDKRRGRDPEMGGKPRRKNPQEGLFNELQKDKMAEAFSEIGMKGERRRGKGHDGLFQGLSTATKDTFDALHMQALPPR

SEQ ID NO: 1852 - DNA, 741 bp, Artificial Sequence
  hu25E6R
gaggtgcagctggtggaatctggcggaggactggtcaagcctggaggcagcctgagactgagctgcgccgccagcggcttcacattcagcagctacggcatgagctgggtgcggcaggcccctggcaagggcctggaatgggtcagcaccatcagcaacggcggaagacacaccttctaccccgacagcgtgaagggcagattcaccatctcaagagataacgccaagaacagcctgtacctgcagatgaacagcctgcgggccgaggacaccgccgtgtactactgcgccagacagaccggcacagagggctggttcgcctactggggccagggcaccctggtgaccgtgtccagcggcggtggcggaagcggaggcggtggctccggtggcggaggcagcgacatcgtgatgacccagacccctctgtctctgagcgtgacccctggccagcctgccagcatctcttgtaaaagcagccagagcctgctggacagcgacggcaagacctacctgaactggtacctgcagaagcccggccaaagccctcagctgctgatctacctggtgtccaagctggatagcggtgttcctgatagattcagcggatctggcagcggcaccgacttcaccctgaagatcagcagagtggaagccgaggacgtgggcgtgtactactgctggcagggcacacacttcccccagacattcggccagggcaccaaggtggaaatcaagcgg

SEQ ID NO: 1853 - protein, 247 aa, Artificial Sequence
  hu25E6R
EVQLVESGGGLVKPGGSLRLSCAASGFTFSSYGMSWVRQAPGKGLEWVSTISNGGRHTFYPDSVKGRFTISRDNAKNSLYLQMNSLRAEDTAVYYCARQTGTEGWFAYWGQGTLVTVSSGGGGSGGGGSGGGGSDIVMTQTPLSLSVTPGQPASISCKSSQSLLDSDGKTYLNWYLQKPGQSPQLLIYLVSKLDSGVPDRFSGSGSGTDFTLKISRVEAEDVGVYYCWQGTHFPQTFGQGTKVEIKR

SEQ ID NO: 1854 - DNA, 744 bp, Artificial Sequence
  hu25E6RT full sequence
gaggtgcagctggtggaatctggcggaggactggtcaagcctggaggcagcctgagactgagctgcgccgccagcggcttcacattcagcagctacggcatgagctgggtgcggcaggcccctggcaagggcctggaatgggtcagcaccatcagcaacggcggaagacacaccttctaccccgacagcgtgaagggcagattcaccatctcaagagataacgccaagaacagcctgtacctgcagatgaacagcctgcgggccgaggacaccgccgtgtactactgcgccagacagaccggcacagagggctggttcgcctactggggccagggcaccctggtgaccgtgtccagcggcggtggcggaagcggaggcggtggctccggtggcggaggcagcgacatcgtgatgacccagacccctctgtctctgagcgtgacccctggccagcctgccagcatctcttgtaaaagcagccagagcctgctggacagcgacggcaagacctacctgaactggtacctgcagaagcccggccaaagccctcagctgctgatctacctggtgtccaagctggatagcggtgttcctgatagattcagcggatctggcagcggcaccgacttcaccctgaagatcagcagagtggaagccgaggacgtgggcgtgtactactgctggcagggcacacacttcccccagacattcggccagggcaccaaggtggaaatcaagcggacc

SEQ ID NO: 1855 - protein, 248 aa, Artificial Sequence
  hu25E6RT full sequence
EVQLVESGGGLVKPGGSLRLSCAASGFTFSSYGMSWVRQAPGKGLEWVSTISNGGRHTFYPDSVKGRFTISRDNAKNSLYLQMNSLRAEDTAVYYCARQTGTEGWFAYWGQGTLVTVSSGGGGSGGGGSGGGGSDIVMTQTPLSLSVTPGQPASISCKSSQSLLDSDGKTYLNWYLQKPGQSPQLLIYLVSKLDSGVPDRFSGSGSGTDFTLKISRVEAEDVGVYYCWQGTHFPQTFGQGTKVEIKRT

SEQ ID NO: 1856 - DNA, 1392 bp, Artificial Sequence
  mu25E6-CAR T-28-28-3z
atggccttaccagtgaccgccttgctcctgccgctggccttgctgctccacgccgccaggccggaggtgcagctggtggagtctgggggagacttagtgaagcctggagggtccctgaaactctcctgtgcagcctctggtttcactttcagtagttatggaatgtcttgggttcgccagactccagacaagaggctggagtgggtcgcaaccattagtaatggtggtagacacaccttctatccagacagtgtgaaggggcgattcaccatctccagagacaatgccaagaacaccctgtatctgcaaatgagcagtctgaagtctgaggacacagccatgtatttatgtgtaagacagactgggacggagggctggtttgcttactggggccaagggactctggtcactgtctctgcaggtggcggaggatctggcggaggtggaagcggcggaggcggatccgatgttgtgatgacccagactccactcactttgtcggttaccattggacaaccagcctccatctcttgcaagtcaagtcagagcctcttagatagtgatggaaagacatatttgaattggttgttacagaggccaggccagtctccaaagcgcctaatctatctggtgtctaaactggactctggagtccctgacaggttcactggcagtggatcagggacagatttcacactgaaaatcagcagagtggaggctgaggatttgggagtttattattgctggcaaggtacacattttcctcagacgttcggtggaggcaccaagctggaaatcaaaaagcacctgtgtccttctccactgttccccggccctagcaagcctttctgggtcctggtggtggtgggcggagtgctggcctgctacagcctgctggtgaccgtggcctttatcatcttctgggtgaggagtaagaggagcaggctcctgcacagtgactacatgaacatgactcctagaagacctgggcctaccagaaagcattaccagccctatgccccaccacgcgacttcgcagcctatcgctccagagtgaagttcagcaggagcgcagacgcccccgcgtacaagcagggccagaaccagctctataacgagctcaatctaggacgaagagaggagtacgatgttttggacaagagacgtggccgggaccctgagatggggggaaagccgagaaggaagaaccctcaggaaggcctgtacaatgaactgcagaaagataagatggcggaggcctacagtgagattgggatgaaaggcgagcgccggaggggcaaggggcacgatggcctttaccagggtctcagtacagccaccaaggacacctacgacgcccttcacatgcaggccctgccccctcgctgataa

SEQ ID NO: 1857 - protein, 462 aa, Artificial Sequence
  mu25E6-CAR T-28-28-3z
MALPVTALLLPLALLLHAARPEVQLVESGGDLVKPGGSLKLSCAASGFTFSSYGMSWVRQTPDKRLEWVATISNGGRHTFYPDSVKGRFTISRDNAKNTLYLQMSSLKSEDTAMYLCVRQTGTEGWFAYWGQGTLVTVSAGGGGSGGGGSGGGGSDVVMTQTPLTLSVTIGQPASISCKSSQSLLDSDGKTYLNWLLQRPGQSPKRLIYLVSKLDSGVPDRFTGSGSGTDFTLKISRVEAEDLGVYYCWQGTHFPQTFGGGTKLEIKKHLCPSPLFPGPSKPFWVLVVVGGVLACYSLLVTVAFIIFWVRSKRSRLLHSDYMNMTPRRPGPTRKHYQPYAPPRDFAAYRSRVKFSRSADAPAYKQGQNQLYNELNLGRREEYDVLDKRRGRDPEMGGKPRRKNPQEGLYNELQKDKMAEAYSEIGMKGERRRGKGHDGLYQGLSTATKDTYDALHMQALPPR

SEQ ID NO: 1858 - DNA, 1392 bp, Artificial Sequence
  hu25E6-CAR T-28-28-3z
atggccttaccagtgaccgccttgctcctgccgctggccttgctgctccacgccgccaggccggaggtgcagctggtggaatctggcggaggactggtcaagcctggaggcagcctgagactgagctgcgccgccagcggcttcacattcagcagctacggcatgagctgggtgcggcaggcccctggcaagggcctggaatgggtcagcaccatcagcaacggcggaagacacaccttctaccccgacagcgtgaagggcagattcaccatctcaagagataacgccaagaacagcctgtacctgcagatgaacagcctgcgggccgaggacaccgccgtgtactactgcgccagacagaccggcacagagggctggttcgcctactggggccagggcaccctggtgaccgtgtccagcggcggtggcggaagcggaggcggtggctccggtggcggaggcagcgacatcgtgatgacccagacccctctgtctctgagcgtgacccctggccagcctgccagcatctcttgtaaaagcagccagagcctgctggacagcgacggcaagacctacctgaactggtacctgcagaagcccggccaaagccctcagctgctgatctacctggtgtccaagctggatagcggtgttcctgatagattcagcggatctggcagcggcaccgacttcaccctgaagatcagcagagtggaagccgaggacgtgggcgtgtactactgctggcagggcacacacttcccccagacattcggccagggcaccaaggtggaaatcaagaagcacctgtgtccttctccactgttccccggccctagcaagcctttctgggtcctggtggtggtgggcggagtgctggcctgctacagcctgctggtgaccgtggcctttatcatcttctgggtgaggagtaagaggagcaggctcctgcacagtgactacatgaacatgactcctagaagacctgggcctaccagaaagcattaccagccctatgccccaccacgcgacttcgcagcctatcgctccagagtgaagttcagcaggagcgcagacgcccccgcgtacaagcagggccagaaccagctctataacgagctcaatctaggacgaagagaggagtacgatgttttggacaagagacgtggccgggaccctgagatggggggaaagccgagaaggaagaaccctcaggaaggcctgtacaatgaactgcagaaagataagatggcggaggcctacagtgagattgggatgaaaggcgagcgccggaggggcaaggggcacgatggcctttaccagggtctcagtacagccaccaaggacacctacgacgcccttcacatgcaggccctgccccctcgctgataa

SEQ ID NO: 1859 - protein, 462 aa, Artificial Sequence
  hu25E6-CAR T-28-28-3z
MALPVTALLLPLALLLHAARPEVQLVESGGGLVKPGGSLRLSCAASGFTFSSYGMSWVRQAPGKGLEWVSTISNGGRHTFYPDSVKGRFTISRDNAKNSLYLQMNSLRAEDTAVYYCARQTGTEGWFAYWGQGTLVTVSSGGGGSGGGGSGGGGSDIVMTQTPLSLSVTPGQPASISCKSSQSLLDSDGKTYLNWYLQKPGQSPQLLIYLVSKLDSGVPDRFSGSGSGTDFTLKISRVEAEDVGVYYCWQGTHFPQTFGQGTKVEIKKHLCPSPLFPGPSKPFWVLVVVGGVLACYSLLVTVAFIIFWVRSKRSRLLHSDYMNMTPRRPGPTRKHYQPYAPPRDFAAYRSRVKFSRSADAPAYKQGQNQLYNELNLGRREEYDVLDKRRGRDPEMGGKPRRKNPQEGLYNELQKDKMAEAYSEIGMKGERRRGKGHDGLYQGLSTATKDTYDALHMQALPPR

SEQ ID NO: 1860 - DNA, 1392 bp, Artificial Sequence
  mu25E6-CAR T-28-28-3z-1XX
atggccttaccagtgaccgccttgctcctgccgctggccttgctgctccacgccgccaggccggaggtgcagctggtggagtctgggggagacttagtgaagcctggagggtccctgaaactctcctgtgcagcctctggtttcactttcagtagttatggaatgtcttgggttcgccagactccagacaagaggctggagtgggtcgcaaccattagtaatggtggtagacacaccttctatccagacagtgtgaaggggcgattcaccatctccagagacaatgccaagaacaccctgtatctgcaaatgagcagtctgaagtctgaggacacagccatgtatttatgtgtaagacagactgggacggagggctggtttgcttactggggccaagggactctggtcactgtctctgcaggtggcggaggatctggcggaggtggaagcggcggaggcggatccgatgttgtgatgacccagactccactcactttgtcggttaccattggacaaccagcctccatctcttgcaagtcaagtcagagcctcttagatagtgatggaaagacatatttgaattggttgttacagaggccaggccagtctccaaagcgcctaatctatctggtgtctaaactggactctggagtccctgacaggttcactggcagtggatcagggacagatttcacactgaaaatcagcagagtggaggctgaggatttgggagtttattattgctggcaaggtacacattttcctcagacgttcggtggaggcaccaagctggaaatcaaaaagcacctgtgtccttctccactgttccccggccctagcaagcctttctgggtcctggtggtggtgggcggagtgctggcctgctacagcctgctggtgaccgtggcctttatcatcttctgggtgaggagtaagaggagcaggctcctgcacagtgactacatgaacatgactcctagaagacctgggcctaccagaaagcattaccagccctatgccccaccacgcgacttcgcagcctatcgctccagagtgaagttcagcaggagcgcagacgcccccgcgtacaagcagggccagaaccagctctataacgagctcaatctaggacgaagagaggagtacgatgttttggacaagagacgtggccgggaccctgagatggggggaaagccgagaaggaagaaccctcaggaaggcctgttcaatgaactgcagaaagataagatggcggaggccttcagtgagattgggatgaaaggcgagcgccggaggggcaaggggcacgatggccttttccagggtctcagtacagccaccaaggacaccttcgacgcccttcacatgcaggccctgccccctcgctgataa

SEQ ID NO: 1861 - protein, 462 aa, Artificial Sequence
  mu25E6-CAR T-28-28-3z-1XX
MALPVTALLLPLALLLHAARPEVQLVESGGDLVKPGGSLKLSCAASGFTFSSYGMSWVRQTPDKRLEWVATISNGGRHTFYPDSVKGRFTISRDNAKNTLYLQMSSLKSEDTAMYLCVRQTGTEGWFAYWGQGTLVTVSAGGGGSGGGGSGGGGSDVVMTQTPLTLSVTIGQPASISCKSSQSLLDSDGKTYLNWLLQRPGQSPKRLIYLVSKLDSGVPDRFTGSGSGTDFTLKISRVEAEDLGVYYCWQGTHFPQTFGGGTKLEIKKHLCPSPLFPGPSKPFWVLVVVGGVLACYSLLVTVAFIIFWVRSKRSRLLHSDYMNMTPRRPGPTRKHYQPYAPPRDFAAYRSRVKFSRSADAPAYKQGQNQLYNELNLGRREEYDVLDKRRGRDPEMGGKPRRKNPQEGLFNELQKDKMAEAFSEIGMKGERRRGKGHDGLFQGLSTATKDTFDALHMQALPPR

SEQ ID NO: 1862 - DNA, 1392 bp, Artificial Sequence
  hu25E6-CAR T-28-28-3z-1XX
atggccttaccagtgaccgccttgctcctgccgctggccttgctgctccacgccgccaggccggaggtgcagctggtggaatctggcggaggactggtcaagcctggaggcagcctgagactgagctgcgccgccagcggcttcacattcagcagctacggcatgagctgggtgcggcaggcccctggcaagggcctggaatgggtcagcaccatcagcaacggcggaagacacaccttctaccccgacagcgtgaagggcagattcaccatctcaagagataacgccaagaacagcctgtacctgcagatgaacagcctgcgggccgaggacaccgccgtgtactactgcgccagacagaccggcacagagggctggttcgcctactggggccagggcaccctggtgaccgtgtccagcggcggtggcggaagcggaggcggtggctccggtggcggaggcagcgacatcgtgatgacccagacccctctgtctctgagcgtgacccctggccagcctgccagcatctcttgtaaaagcagccagagcctgctggacagcgacggcaagacctacctgaactggtacctgcagaagcccggccaaagccctcagctgctgatctacctggtgtccaagctggatagcggtgttcctgatagattcagcggatctggcagcggcaccgacttcaccctgaagatcagcagagtggaagccgaggacgtgggcgtgtactactgctggcagggcacacacttcccccagacattcggccagggcaccaaggtggaaatcaagaagcacctgtgtccttctccactgttccccggccctagcaagcctttctgggtcctggtggtggtgggcggagtgctggcctgctacagcctgctggtgaccgtggcctttatcatcttctgggtgaggagtaagaggagcaggctcctgcacagtgactacatgaacatgactcctagaagacctgggcctaccagaaagcattaccagccctatgccccaccacgcgacttcgcagcctatcgctccagagtgaagttcagcaggagcgcagacgcccccgcgtacaagcagggccagaaccagctctataacgagctcaatctaggacgaagagaggagtacgatgttttggacaagagacgtggccgggaccctgagatggggggaaagccgagaaggaagaaccctcaggaaggcctgttcaatgaactgcagaaagataagatggcggaggccttcagtgagattgggatgaaaggcgagcgccggaggggcaaggggcacgatggccttttccagggtctcagtacagccaccaaggacaccttcgacgcccttcacatgcaggccctgccccctcgctgataa

SEQ ID NO: 1863 - protein, 462 aa, Artificial Sequence
  hu25E6-CAR T-28-28-3z-1XX
MALPVTALLLPLALLLHAARPEVQLVESGGGLVKPGGSLRLSCAASGFTFSSYGMSWVRQAPGKGLEWVSTISNGGRHTFYPDSVKGRFTISRDNAKNSLYLQMNSLRAEDTAVYYCARQTGTEGWFAYWGQGTLVTVSSGGGGSGGGGSGGGGSDIVMTQTPLSLSVTPGQPASISCKSSQSLLDSDGKTYLNWYLQKPGQSPQLLIYLVSKLDSGVPDRFSGSGSGTDFTLKISRVEAEDVGVYYCWQGTHFPQTFGQGTKVEIKKHLCPSPLFPGPSKPFWVLVVVGGVLACYSLLVTVAFIIFWVRSKRSRLLHSDYMNMTPRRPGPTRKHYQPYAPPRDFAAYRSRVKFSRSADAPAYKQGQNQLYNELNLGRREEYDVLDKRRGRDPEMGGKPRRKNPQEGLFNELQKDKMAEAFSEIGMKGERRRGKGHDGLFQGLSTATKDTFDALHMQALPPR

SEQ ID NO: 1864 - DNA, 1449 bp, Artificial Sequence
  muMNC2-CAR T-28-28-3z-1XX
atggccttaccagtgaccgccttgctcctgccgctggccttgctgctccacgccgccaggccggaggtccagctggaggagtcagggggaggcttagtgaagcctggagggtccctgaaactctcctgtgcagcctctggattcactttcagtggctatgccatgtcttgggttcgccagactccggagaagaggctggagtgggtcgcaaccattagtagtggtggtacttatatctactatccagacagtgtgaaggggcgattcaccatctccagagacaatgccaagaacaccctgtacctgcaaatgagcagtctgaggtctgaggacacggccatgtattactgtgcaagacttgggggggataattactacgaatacttcgatgtctggggcgcagggaccacggtcaccgtctcctccgccaaaacgacacccccatctgtctatggcggtggcggatccggcggtggcggatccggcggtggcggatccgacattgtgatcacacagtctacagcttccttaggtgtatctctggggcagagggccaccatctcatgcagggccagcaaaagtgtcagtacatctggctatagttatatgcactggtaccaacagagaccaggacagccacccaaactcctcatctatcttgcatccaacctagaatctggggtccctgccaggttcagtggcagtgggtctgggacagacttcaccctcaacatccatcctgtggaggaggaggatgctgcaacctattactgtcagcacagtagggagcttccgttcacgttcggaggggggaccaagctggagataaaacgggctgatgctgcaccaactgtatccaagcacctgtgtccttctccactgttccccggccctagcaagcctttctgggtcctggtggtggtgggcggagtgctggcctgctacagcctgctggtgaccgtggcctttatcatcttctgggtgaggagtaagaggagcaggctcctgcacagtgactacatgaacatgactcctagaagacctgggcctaccagaaagcattaccagccctatgccccaccacgcgacttcgcagcctatcgctccagagtgaagttcagcaggagcgcagacgcccccgcgtacaagcagggccagaaccagctctataacgagctcaatctaggacgaagagaggagtacgatgttttggacaagagacgtggccgggaccctgagatggggggaaagccgagaaggaagaaccctcaggaaggcctgttcaatgaactgcagaaagataagatggcggaggccttcagtgagattgggatgaaaggcgagcgccggaggggcaaggggcacgatggccttttccagggtctcagtacagccaccaaggacaccttcgacgcccttcacatgcaggccctgccccctcgctgataa

SEQ ID NO: 1865 - protein, 481 aa, Artificial Sequence
  muMNC2-CAR T-28-28-3z-1XX
MALPVTALLLPLALLLHAARPEVQLEESGGGLVKPGGSLKLSCAASGFTFSGYAMSWVRQTPEKRLEWVATISSGGTYIYYPDSVKGRFTISRDNAKNTLYLQMSSLRSEDTAMYYCARLGGDNYYEYFDVWGAGTTVTVSSAKTTPPSVYGGGGSGGGGSGGGGSDIVITQSTASLGVSLGQRATISCRASKSVSTSGYSYMHWYQQRPGQPPKLLIYLASNLESGVPARFSGSGSGTDFTLNIHPVEEEDAATYYCQHSRELPFTFGGGTKLEIKRADAAPTVSKHLCPSPLFPGPSKPFWVLVVVGGVLACYSLLVTVAFIIFWVRSKRSRLLHSDYMNMTPRRPGPTRKHYQPYAPPRDFAAYRSRVKFSRSADAPAYKQGQNQLYNELNLGRREEYDVLDKRRGRDPEMGGKPRRKNPQEGLFNELQKDKMAEAFSEIGMKGERRRGKGHDGLFQGLSTATKDTFDALHMQALPPR

SEQ ID NO: 1866 - DNA, 1401 bp, Artificial Sequence; identical to SEQ ID NO: 1784
  huMNC2-CAR T-28-28-3z-1XX

SEQ ID NO: 1867 - protein, 465 aa, Artificial Sequence; identical to SEQ ID NO: 1785
  huMNC2-CAR T-28-28-3z-1XX

SEQ ID NO: 1868 - DNA, 1383 bp, Artificial Sequence
  muMNE6-CAR T-28-28-3z-1XX
atggccttaccagtgaccgccttgctcctgccgctggccttgctgctccacgccgccaggccggaggtgaaggtggtggagtctgggggagacttagtgaagcctggagggtccctgaaactctcctgtgtagtctctggattcactttcagtagatatggcatgtcttgggttcgccagactccaggcaagaggctggagtgggtcgcaaccattagtggtggcggtacttacatctactatccagacagtgtgaaggggcgattcaccatctccagagacaatgccaagaacaccctgtacctgcaaatgagcagtctgaagtctgaggacacagccatgtatcactgtacaagggataactacggtaggaactacgactacggtatggactactggggtcaaggaacctcagtcaccgtctcctcaggcggtggcggatccggcggtggcggatccggcggtggcggatcccaaattgttctcacccagtctccagcaatcatgtctgcatctccaggggaggaggtcaccctaacctgcagtgccacctcaagtgtaagttacatacactggttccagcagaggccaggcacttctcccaaactctggatttatagcacatccaacctggcttctggagtccctgttcgcttcagtggcagtggatatgggacctcttactctctcacaatcagccgaatggaggctgaagatgctgccacttattactgccagcaaaggagtagttccccattcacgttcggctcggggacaaagttggaaataaaaaagcacctgtgtccttctccactgttccccggccctagcaagcctttctgggtcctggtggtggtgggcggagtgctggcctgctacagcctgctggtgaccgtggcctttatcatcttctgggtgaggagtaagaggagcaggctcctgcacagtgactacatgaacatgactcctagaagacctgggcctaccagaaagcattaccagccctatgccccaccacgcgacttcgcagcctatcgctccagagtgaagttcagcaggagcgcagacgcccccgcgtacaagcagggccagaaccagctctataacgagctcaatctaggacgaagagaggagtacgatgttttggacaagagacgtggccgggaccctgagatggggggaaagccgagaaggaagaaccctcaggaaggcctgttcaatgaactgcagaaagataagatggcggaggccttcagtgagattgggatgaaaggcgagcgccggaggggcaaggggcacgatggccttttccagggtctcagtacagccaccaaggacaccttcgacgcccttcacatgcaggccctgccccctcgctgataa

SEQ ID NO: 1869 - protein, 459 aa, Artificial Sequence
  muMNE6-CAR T-28-28-3z-1XX
MALPVTALLLPLALLLHAARPEVKVVESGGDLVKPGGSLKLSCVVSGFTFSRYGMSWVRQTPGKRLEWVATISGGGTYIYYPDSVKGRFTISRDNAKNTLYLQMSSLKSEDTAMYHCTRDNYGRNYDYGMDYWGQGTSVTVSSGGGGSGGGGSGGGGSQIVLTQSPAIMSASPGEEVTLTCSATSSVSYIHWFQQRPGTSPKLWIYSTSNLASGVPVRFSGSGYGTSYSLTISRMEAEDAATYYCQQRSSSPFTFGSGTKLEIKKHLCPSPLFPGPSKPFWVLVVVGGVLACYSLLVTVAFIIFWVRSKRSRLLHSDYMNMTPRRPGPTRKHYQPYAPPRDFAAYRSRVKFSRSADAPAYKQGQNQLYNELNLGRREEYDVLDKRRGRDPEMGGKPRRKNPQEGLFNELQKDKMAEAFSEIGMKGERRRGKGHDGLFQGLSTATKDTFDALHMQALPPR

SEQ ID NO: 1870 - DNA, 1383 bp, Artificial Sequence
  huMNE6-CAR T-28-28-3z-1XX
atggccttaccagtgaccgccttgctcctgccgctggccttgctgctccacgccgccaggccggaggtgcagctggtggagtctgggggaggcctggtcaagcctggggggtccctgagactctcctgtgcagcctctggattcaccttcagtaggtatggcatgagctgggtccgccaggctccagggaagaggctggagtgggtctcaaccattagtggcggaggcacctacatatactacccagactcagtgaagggccgattcaccatctccagagacaacgccaagaacaccctgtatctgcaaatgaacagcctgagagccgaggacacggctgtgtattactgtaccagagataactatggccgcaactatgattatggcatggattattggggccagggcaccctggtgaccgtgagcagcggcggtggcggatccggcggtggcggatccggcggtggcggatccgaaattgtgttgacacagtctccagccaccctgtctttgtctccaggggaaagagccaccctcacctgcagcgccaccagcagtgttagctacatccactggtaccaacagaggcctggccagagccccaggctcctcatctatagcacctccaacctggccagcggcatcccagccaggttcagtggcagtgggtctgggagcgactacactctcaccatcagcagcctagagcctgaagattttgcagtttattactgtcagcagcgtagcagctcccctttcacctttggcagcggcaccaaagtggaaattaaaaagcacctgtgtccttctccactgttccccggccctagcaagcctttctgggtcctggtggtggtgggcggagtgctggcctgctacagcctgctggtgaccgtggcctttatcatcttctgggtgaggagtaagaggagcaggctcctgcacagtgactacatgaacatgactcctagaagacctgggcctaccagaaagcattaccagccctatgccccaccacgcgacttcgcagcctatcgctccagagtgaagttcagcaggagcgcagacgcccccgcgtacaagcagggccagaaccagctctataacgagctcaatctaggacgaagagaggagtacgatgttttggacaagagacgtggccgggaccctgagatggggggaaagccgagaaggaagaaccctcaggaaggcctgttcaatgaactgcagaaagataagatggcggaggccttcagtgagattgggatgaaaggcgagcgccggaggggcaaggggcacgatggccttttccagggtctcagtacagccaccaaggacaccttcgacgcccttcacatgcaggccctgccccctcgctgataa

SEQ ID NO: 1871 - protein, 459 aa, Artificial Sequence
  huMNE6-CAR T-28-28-3z-1XX
MALPVTALLLPLALLLHAARPEVQLVESGGGLVKPGGSLRLSCAASGFTFSRYGMSWVRQAPGKRLEWVSTISGGGTYIYYPDSVKGRFTISRDNAKNTLYLQMNSLRAEDTAVYYCTRDNYGRNYDYGMDYWGQGTLVTVSSGGGGSGGGGSGGGGSEIVLTQSPATLSLSPGERATLTCSATSSVSYIHWYQQRPGQSPRLLIYSTSNLASGIPARFSGSGSGSDYTLTISSLEPEDFAVYYCQQRSSSPFTFGSGTKVEIKKHLCPSPLFPGPSKPFWVLVVVGGVLACYSLLVTVAFIIFWVRSKRSRLLHSDYMNMTPRRPGPTRKHYQPYAPPRDFAAYRSRVKFSRSADAPAYKQGQNQLYNELNLGRREEYDVLDKRRGRDPEMGGKPRRKNPQEGLFNELQKDKMAEAFSEIGMKGERRRGKGHDGLFQGLSTATKDTFDALHMQALPPR

SEQ ID NO: 1872 - DNA, 2263 bp, Artificial Sequence
  muMNC2-28-28-3z1XX-Foxp3-NFAT-IL-18
atggccttaccagtgaccgccttgctcctgccgctggccttgctgctccacgccgccaggccggaggtccagctggaggagtcagggggaggcttagtgaagcctggagggtccctgaaactctcctgtgcagcctctggattcactttcagtggctatgccatgtcttgggttcgccagactccggagaagaggctggagtgggtcgcaaccattagtagtggtggtacttatatctactatccagacagtgtgaaggggcgattcaccatctccagagacaatgccaagaacaccctgtacctgcaaatgagcagtctgaggtctgaggacacggccatgtattactgtgcaagacttgggggggataattactacgaatacttcgatgtctggggcgcagggaccacggtcaccgtctcctccgccaaaacgacacccccatctgtctatggcggtggcggatccggcggtggcggatccggcggtggcggatccgacattgtgatcacacagtctacagcttccttaggtgtatctctggggcagagggccaccatctcatgcagggccagcaaaagtgtcagtacatctggctatagttatatgcactggtaccaacagagaccaggacagccacccaaactcctcatctatcttgcatccaacctagaatctggggtccctgccaggttcagtggcagtgggtctgggacagacttcaccctcaacatccatcctgtggaggaggaggatgctgcaacctattactgtcagcacagtagggagcttccgttcacgttcggaggggggaccaagctggagataaaacgggctgatgctgcaccaactgtatccaagcacctgtgtccttctccactgttccccggccctagcaagcctttctgggtcctggtggtggtgggcggagtgctggcctgctacagcctgctggtgaccgtggcctttatcatcttctgggtgaggagtaagaggagcaggctcctgcacagtgactacatgaacatgactcctagaagacctgggcctaccagaaagcattaccagccctatgccccaccacgcgacttcgcagcctatcgctccagagtgaagttcagcaggagcgcagacgcccccgcgtacaagcagggccagaaccagctctataacgagctcaatctaggacgaagagaggagtacgatgttttggacaagagacgtggccgggaccctgagatggggggaaagccgagaaggaagaaccctcaggaaggcctgttcaatgaactgcagaaagataagatggcggaggccttcagtgagattgggatgaaaggcgagcgccggaggggcaaggggcacgatggccttttccagggtctcagtacagccaccaaggacaccttcgacgcccttcacatgcaggccctgccccctcgctgataagtttaaactgccagaacatttctctggcctaactggccggtaccggcttcattttttccatttactgcagaggcttcattttttccatttactgcagaggcttcattttttccatttactgcagaactagttaggcgtgtacggtgggaggcctatataagcagagctcgtttagtgaaccgtcagatcgcctggagacgccatccacgctgttttgacctccatagaagacaccgggaccgatccagcctcgagagacccaatgctagccaccatggccttaccagtgaccgccttgctcctgccgctggccttgctgctccacgccgccaggccgtacttcggcaagctggaaagcaagctgagcgtgatccggaacctgaacgaccaggtgctgttcatcgatcagggcaacagacccctgttcgaggacatgaccgacagcgactgcagagacaacgcccctcggaccatcttcatcatcagcatgtacaaggacagccagcctagaggcatggccgtgaccatctctgtgaagtgcgagaagatcagcaccctgagctgcgagaacaagatcatcagcttcaaagagatgaacccgccggacaacatcaaggacaccaagagcgacatcatattcttccagcggagcgtgcccggccacgacaacaagatgcagtttgagagcagcagctacgagggctacttcctggcctgcgagaaagagcgggacctgttcaagctgatcctgaagaaagaggacgaactgggcgaccgcagcatcatgttcaccgtgcagaacgaggactgataa

SEQ ID NO: 1873 - DNA, 2215 bp, Artificial Sequence
  huMNC2-28-28-3z1XX-Foxp3-NFAT-IL-18
atggccttaccagtgaccgccttgctcctgccgctggccttgctgctccacgccgccaggccggaggtgcagctggtggagtctgggggaggcctggtcaagcctggggggtccctgagactctcctgtgcagcctctggattcaccttcagtggctatgccatgagctgggtccgccaggctccagggaaggggctggagtgggtctcaaccattagtagtggcggaacctacatatactaccccgactcagtgaagggccgattcaccatctccagagacaacgccaagaactcactgtatctgcaaatgaacagcctgagagccgaggacacggccgtgtattactgtgcgagacttgggggggataattactacgaatacttcgatgtctggggcaaagggaccacggtcaccgtctcctccggcggtggcggatccggcggtggcggatccggcggtggcggatccgacattgtgctgacccagtctccagcctccttggccgtgtctccaggacagagggccaccatcacctgcagagccagtaagagtgtcagtaccagcggatactcctacatgcactggtatcagcagaaaccaggacaacctcctaaactcctgatttacctggcatccaatctggagagcggggtcccagccaggttcagcggcagtgggtctgggaccgatttcaccctcacaattaatcctgtggaagctaatgatactgcaaattattactgtcagcacagtagggagctgcctttcacattcggcggagggaccaaggtggagatcaaacgaactaagcacctgtgtccttctccactgttccccggccctagcaagcctttctgggtcctggtggtggtgggcggagtgctggcctgctacagcctgctggtgaccgtggcctttatcatcttctgggtgaggagtaagaggagcaggctcctgcacagtgactacatgaacatgactcctagaagacctgggcctaccagaaagcattaccagccctatgccccaccacgcgacttcgcagcctatcgctccagagtgaagttcagcaggagcgcagacgcccccgcgtacaagcagggccagaaccagctctataacgagctcaatctaggacgaagagaggagtacgatgttttggacaagagacgtggccgggaccctgagatggggggaaagccgagaaggaagaaccctcaggaaggcctgttcaatgaactgcagaaagataagatggcggaggccttcagtgagattgggatgaaaggcgagcgccggaggggcaaggggcacgatggccttttccagggtctcagtacagccaccaaggacaccttcgacgcccttcacatgcaggccctgccccctcgctgataagtttaaactgccagaacatttctctggcctaactggccggtaccggcttcattttttccatttactgcagaggcttcattttttccatttactgcagaggcttcattttttccatttactgcagaactagttaggcgtgtacggtgggaggcctatataagcagagctcgtttagtgaaccgtcagatcgcctggagacgccatccacgctgttttgacctccatagaagacaccgggaccgatccagcctcgagagacccaatgctagccaccatggccttaccagtgaccgccttgctcctgccgctggccttgctgctccacgccgccaggccgtacttcggcaagctggaaagcaagctgagcgtgatccggaacctgaacgaccaggtgctgttcatcgatcagggcaacagacccctgttcgaggacatgaccgacagcgactgcagagacaacgcccctcggaccatcttcatcatcagcatgtacaaggacagccagcctagaggcatggccgtgaccatctctgtgaagtgcgagaagatcagcaccctgagctgcgagaacaagatcatcagcttcaaagagatgaacccgccggacaacatcaaggacaccaagagcgacatcatattcttccagcggagcgtgcccggccacgacaacaagatgcagtttgagagcagcagctacgagggctacttcctggcctgcgagaaagagcgggacctgttcaagctgatcctgaagaaagaggacgaactgggcgaccgcagcatcatgttcaccgtgcagaacgaggactgataa

SEQ ID NO: 1874 - DNA, 2197 bp, Artificial Sequence
  muMNE6-28-28-3z1XX-Foxp3-NFAT-IL-18
atggccttaccagtgaccgccttgctcctgccgctggccttgctgctccacgccgccaggccggaggtgaaggtggtggagtctgggggagacttagtgaagcctggagggtccctgaaactctcctgtgtagtctctggattcactttcagtagatatggcatgtcttgggttcgccagactccaggcaagaggctggagtgggtcgcaaccattagtggtggcggtacttacatctactatccagacagtgtgaaggggcgattcaccatctccagagacaatgccaagaacaccctgtacctgcaaatgagcagtctgaagtctgaggacacagccatgtatcactgtacaagggataactacggtaggaactacgactacggtatggactactggggtcaaggaacctcagtcaccgtctcctcaggcggtggcggatccggcggtggcggatccggcggtggcggatcccaaattgttctcacccagtctccagcaatcatgtctgcatctccaggggaggaggtcaccctaacctgcagtgccacctcaagtgtaagttacatacactggttccagcagaggccaggcacttctcccaaactctggatttatagcacatccaacctggcttctggagtccctgttcgcttcagtggcagtggatatgggacctcttactctctcacaatcagccgaatggaggctgaagatgctgccacttattactgccagcaaaggagtagttccccattcacgttcggctcggggacaaagttggaaataaaaaagcacctgtgtccttctccactgttccccggccctagcaagcctttctgggtcctggtggtggtgggcggagtgctggcctgctacagcctgctggtgaccgtggcctttatcatcttctgggtgaggagtaagaggagcaggctcctgcacagtgactacatgaacatgactcctagaagacctgggcctaccagaaagcattaccagccctatgccccaccacgcgacttcgcagcctatcgctccagagtgaagttcagcaggagcgcagacgcccccgcgtacaagcagggccagaaccagctctataacgagctcaatctaggacgaagagaggagtacgatgttttggacaagagacgtggccgggaccctgagatggggggaaagccgagaaggaagaaccctcaggaaggcctgttcaatgaactgcagaaagataagatggcggaggccttcagtgagattgggatgaaaggcgagcgccggaggggcaaggggcacgatggccttttccagggtctcagtacagccaccaaggacaccttcgacgcccttcacatgcaggccctgccccctcgctgataagtttaaactgccagaacatttctctggcctaactggccggtaccggcttcattttttccatttactgcagaggcttcattttttccatttactgcagaggcttcattttttccatttactgcagaactagttaggcgtgtacggtgggaggcctatataagcagagctcgtttagtgaaccgtcagatcgcctggagacgccatccacgctgttttgacctccatagaagacaccgggaccgatccagcctcgagagacccaatgctagccaccatggccttaccagtgaccgccttgctcctgccgctggccttgctgctccacgccgccaggccgtacttcggcaagctggaaagcaagctgagcgtgatccggaacctgaacgaccaggtgctgttcatcgatcagggcaacagacccctgttcgaggacatgaccgacagcgactgcagagacaacgcccctcggaccatcttcatcatcagcatgtacaaggacagccagcctagaggcatggccgtgaccatctctgtgaagtgcgagaagatcagcaccctgagctgcgagaacaagatcatcagcttcaaagagatgaacccgccggacaacatcaaggacaccaagagcgacatcatattcttccagcggagcgtgcccggccacgacaacaagatgcagtttgagagcagcagctacgagggctacttcctggcctgcgagaaagagcgggacctgttcaagctgatcctgaagaaagaggacgaactgggcgaccgcagcatcatgttcaccgtgcagaacgaggactgataa

SEQ ID NO: 1875 - DNA, 2197 bp, Artificial Sequence
  huMNE6-28-28-3z1XX-Foxp3-NFAT-IL-18
atggccttaccagtgaccgccttgctcctgccgctggccttgctgctccacgccgccaggccggaggtgcagctggtggagtctgggggaggcctggtcaagcctggggggtccctgagactctcctgtgcagcctctggattcaccttcagtaggtatggcatgagctgggtccgccaggctccagggaagaggctggagtgggtctcaaccattagtggcggaggcacctacatatactacccagactcagtgaagggccgattcaccatctccagagacaacgccaagaacaccctgtatctgcaaatgaacagcctgagagccgaggacacggctgtgtattactgtaccagagataactatggccgcaactatgattatggcatggattattggggccagggcaccctggtgaccgtgagcagcggcggtggcggatccggcggtggcggatccggcggtggcggatccgaaattgtgttgacacagtctccagccaccctgtctttgtctccaggggaaagagccaccctcacctgcagcgccaccagcagtgttagctacatccactggtaccaacagaggcctggccagagccccaggctcctcatctatagcacctccaacctggccagcggcatcccagccaggttcagtggcagtgggtctgggagcgactacactctcaccatcagcagcctagagcctgaagattttgcagtttattactgtcagcagcgtagcagctcccctttcacctttggcagcggcaccaaagtggaaattaaaaagcacctgtgtccttctccactgttccccggccctagcaagcctttctgggtcctggtggtggtgggcggagtgctggcctgctacagcctgctggtgaccgtggcctttatcatcttctgggtgaggagtaagaggagcaggctcctgcacagtgactacatgaacatgactcctagaagacctgggcctaccagaaagcattaccagccctatgccccaccacgcgacttcgcagcctatcgctccagagtgaagttcagcaggagcgcagacgcccccgcgtacaagcagggccagaaccagctctataacgagctcaatctaggacgaagagaggagtacgatgttttggacaagagacgtggccgggaccctgagatggggggaaagccgagaaggaagaaccctcaggaaggcctgttcaatgaactgcagaaagataagatggcggaggccttcagtgagattgggatgaaaggcgagcgccggaggggcaaggggcacgatggccttttccagggtctcagtacagccaccaaggacaccttcgacgcccttcacatgcaggccctgccccctcgctgataagtttaaactgccagaacatttctctggcctaactggccggtaccggcttcattttttccatttactgcagaggcttcattttttccatttactgcagaggcttcattttttccatttactgcagaactagttaggcgtgtacggtgggaggcctatataagcagagctcgtttagtgaaccgtcagatcgcctggagacgccatccacgctgttttgacctccatagaagacaccgggaccgatccagcctcgagagacccaatgctagccaccatggccttaccagtgaccgccttgctcctgccgctggccttgctgctccacgccgccaggccgtacttcggcaagctggaaagcaagctgagcgtgatccggaacctgaacgaccaggtgctgttcatcgatcagggcaacagacccctgttcgaggacatgaccgacagcgactgcagagacaacgcccctcggaccatcttcatcatcagcatgtacaaggacagccagcctagaggcatggccgtgaccatctctgtgaagtgcgagaagatcagcaccctgagctgcgagaacaagatcatcagcttcaaagagatgaacccgccggacaacatcaaggacaccaagagcgacatcatattcttccagcggagcgtgcccggccacgacaacaagatgcagtttgagagcagcagctacgagggctacttcctggcctgcgagaaagagcgggacctgttcaagctgatcctgaagaaagaggacgaactgggcgaccgcagcatcatgttcaccgtgcagaacgaggactgataa

SEQ ID NO: 1876 - DNA, 2209 bp, Artificial Sequence
  mu20A10-28-28-3z1XX-Foxp3-NFAT-IL-18
atggccttaccagtgaccgccttgctcctgccgctggccttgctgctccacgccgccaggccggaagtgatgctggtggaatctggcggcggactggttaagcctggcggatctctgaagctgagctgtgccgccagcggcttcacctttagcacatacgccatgagctggatccggcagacccctgagaagagactggaatgggttgccagcatcggcagagccggcagcacctactacagcgattctgtgaagggcagattcaccatcagccgggacaacgtgcggaacatcctgtacctgcagatgagcagcctgcggagcgaggataccgccatgtactactgtgccagaggacccatctacaacgactacgacgagttcgcctattggggccagggcacactggttacagtttctgctggtggcggaggatctggcggaggtggaagcggcggaggcggatccaatatcatgatgacacagagcccgagcagcctggctgtgtctgctggcgagaaagtgaccatgtcctgcaagagcagccagagcgtgctgtactccagcaaccagaagaactacctggcctggtatcagcagaagcccggccagtctcctaagctgctgatctactgggccagcaccagagaaagcggcgtgcccgatagattcacaggcagcggcagcggaaccgacttcaccctgacaatcagctctgtgcaggccgaagatctggccgtgtactattgccaccagtacctgtccagcctgacctttggcgccggaacaaagctggaactgaagaagcacctgtgtccttctccactgttccccggccctagcaagcctttctgggtcctggtggtggtgggcggagtgctggcctgctacagcctgctggtgaccgtggcctttatcatcttctgggtgaggagtaagaggagcaggctcctgcacagtgactacatgaacatgactcctagaagacctgggcctaccagaaagcattaccagccctatgccccaccacgcgacttcgcagcctatcgctccagagtgaagttcagcaggagcgcagacgcccccgcgtacaagcagggccagaaccagctctataacgagctcaatctaggacgaagagaggagtacgatgttttggacaagagacgtggccgggaccctgagatggggggaaagccgagaaggaagaaccctcaggaaggcctgttcaatgaactgcagaaagataagatggcggaggccttcagtgagattgggatgaaaggcgagcgccggaggggcaaggggcacgatggccttttccagggtctcagtacagccaccaaggacaccttcgacgcccttcacatgcaggccctgccccctcgctgataagtttaaactgccagaacatttctctggcctaactggccggtaccggcttcattttttccatttactgcagaggcttcattttttccatttactgcagaggcttcattttttccatttactgcagaactagttaggcgtgtacggtgggaggcctatataagcagagctcgtttagtgaaccgtcagatcgcctggagacgccatccacgctgttttgacctccatagaagacaccgggaccgatccagcctcgagagacccaatgctagccaccatggccttaccagtgaccgccttgctcctgccgctggccttgctgctccacgccgccaggccgtacttcggcaagctggaaagcaagctgagcgtgatccggaacctgaacgaccaggtgctgttcatcgatcagggcaacagacccctgttcgaggacatgaccgacagcgactgcagagacaacgcccctcggaccatcttcatcatcagcatgtacaaggacagccagcctagaggcatggccgtgaccatctctgtgaagtgcgagaagatcagcaccctgagctgcgagaacaagatcatcagcttcaaagagatgaacccgccggacaacatcaaggacaccaagagcgacatcatattcttccagcggagcgtgcccggccacgacaacaagatgcagtttgagagcagcagctacgagggctacttcctggcctgcgagaaagagcgggacctgttcaagctgatcctgaagaaagaggacgaactgggcgaccgcagcatcatgttcaccgtgcagaacgaggactgataa

SEQ ID NO: 1877 - DNA, 2212 bp, Artificial Sequence
  hu20A10-28-28-3z1XX-Foxp3-NFAT-IL-18
atggccttaccagtgaccgccttgctcctgccgctggccttgctgctccacgccgccaggccggaggtgcagctggttgaatctggcggcggacttgtgaagcctggcggatctctgagactgagctgtgccgccagcggcttcacctttagcacatacgccatgagctgggtccgacaggcccctggaaaaggccttgaatgggttgcctctatcggcagagccggcagcacctactacagcgattctgtgaagggcagattcaccatcagccgggacaacgccaagaacagcctgtacctgcagatgaactccctgagagccgaggacaccgccgtgtactattgtgccagaggacccatctacaacgactacgacgagttcgcctattggggccagggcacactggtcacagtcagctctggcggtggcggaagcggaggcggtggctccggtggcggaggcagcgacattgtgctgacccagtctccagcctccttggccgtgtctccaggacagagggccaccatcacctgcaagagcagccagagcgtgctgtactccagcaaccagaagaactacctggcctggtatcagcagaaaccaggacaacctcctaaactcctgatttactgggccagcaccagagaaagcggggtcccagccaggttcagcggcagtgggtctgggaccgatttcaccctcacaattaatcctgtggaagctaatgatactgcaaattattactgtcaccagtacctgagcagcctgaccttcggcggagggaccaaggtggagatcaaacgaaagcacctgtgtccttctccactgttccccggccctagcaagcctttctgggtcctggtggtggtgggcggagtgctggcctgctacagcctgctggtgaccgtggcctttatcatcttctgggtgaggagtaagaggagcaggctcctgcacagtgactacatgaacatgactcctagaagacctgggcctaccagaaagcattaccagccctatgccccaccacgcgacttcgcagcctatcgctccagagtgaagttcagcaggagcgcagacgcccccgcgtacaagcagggccagaaccagctctataacgagctcaatctaggacgaagagaggagtacgatgttttggacaagagacgtggccgggaccctgagatggggggaaagccgagaaggaagaaccctcaggaaggcctgttcaatgaactgcagaaagataagatggcggaggccttcagtgagattgggatgaaaggcgagcgccggaggggcaaggggcacgatggccttttccagggtctcagtacagccaccaaggacaccttcgacgcccttcacatgcaggccctgccccctcgctgataagtttaaactgccagaacatttctctggcctaactggccggtaccggcttcattttttccatttactgcagaggcttcattttttccatttactgcagaggcttcattttttccatttactgcagaactagttaggcgtgtacggtgggaggcctatataagcagagctcgtttagtgaaccgtcagatcgcctggagacgccatccacgctgttttgacctccatagaagacaccgggaccgatccagcctcgagagacccaatgctagccaccatggccttaccagtgaccgccttgctcctgccgctggccttgctgctccacgccgccaggccgtacttcggcaagctggaaagcaagctgagcgtgatccggaacctgaacgaccaggtgctgttcatcgatcagggcaacagacccctgttcgaggacatgaccgacagcgactgcagagacaacgcccctcggaccatcttcatcatcagcatgtacaaggacagccagcctagaggcatggccgtgaccatctctgtgaagtgcgagaagatcagcaccctgagctgcgagaacaagatcatcagcttcaaagagatgaacccgccggacaacatcaaggacaccaagagcgacatcatattcttccagcggagcgtgcccggccacgacaacaagatgcagtttgagagcagcagctacgagggctacttcctggcctgcgagaaagagcgggacctgttcaagctgatcctgaagaaagaggacgaactgggcgaccgcagcatcatgttcaccgtgcagaacgaggactgataa

SEQ ID NO: 1878 - DNA, 2206 bp, Artificial Sequence
  mu25E6-8-28-3z1XX-Foxp3-NFAT-IL-18
atggccttaccagtgaccgccttgctcctgccgctggccttgctgctccacgccgccaggccggaggtgcagctggtggagtctgggggagacttagtgaagcctggagggtccctgaaactctcctgtgcagcctctggtttcactttcagtagttatggaatgtcttgggttcgccagactccagacaagaggctggagtgggtcgcaaccattagtaatggtggtagacacaccttctatccagacagtgtgaaggggcgattcaccatctccagagacaatgccaagaacaccctgtatctgcaaatgagcagtctgaagtctgaggacacagccatgtatttatgtgtaagacagactgggacggagggctggtttgcttactggggccaagggactctggtcactgtctctgcaggtggcggaggatctggcggaggtggaagcggcggaggcggatccgatgttgtgatgacccagactccactcactttgtcggttaccattggacaaccagcctccatctcttgcaagtcaagtcagagcctcttagatagtgatggaaagacatatttgaattggttgttacagaggccaggccagtctccaaagcgcctaatctatctggtgtctaaactggactctggagtccctgacaggttcactggcagtggatcagggacagatttcacactgaaaatcagcagagtggaggctgaggatttgggagtttattattgctggcaaggtacacattttcctcagacgttcggtggaggcaccaagctggaaatcaaaaagcacctgtgtccttctccactgttccccggccctagcaagcctttctgggtcctggtggtggtgggcggagtgctggcctgctacagcctgctggtgaccgtggcctttatcatcttctgggtgaggagtaagaggagcaggctcctgcacagtgactacatgaacatgactcctagaagacctgggcctaccagaaagcattaccagccctatgccccaccacgcgacttcgcagcctatcgctccagagtgaagttcagcaggagcgcagacgcccccgcgtacaagcagggccagaaccagctctataacgagctcaatctaggacgaagagaggagtacgatgttttggacaagagacgtggccgggaccctgagatggggggaaagccgagaaggaagaaccctcaggaaggcctgttcaatgaactgcagaaagataagatggcggaggccttcagtgagattgggatgaaaggcgagcgccggaggggcaaggggcacgatggccttttccagggtctcagtacagccaccaaggacaccttcgacgcccttcacatgcaggccctgccccctcgctgataagtttaaactgccagaacatttctctggcctaactggccggtaccggcttcattttttccatttactgcagaggcttcattttttccatttactgcagaggcttcattttttccatttactgcagaactagttaggcgtgtacggtgggaggcctatataagcagagctcgtttagtgaaccgtcagatcgcctggagacgccatccacgctgttttgacctccatagaagacaccgggaccgatccagcctcgagagacccaatgctagccaccatggccttaccagtgaccgccttgctcctgccgctggccttgctgctccacgccgccaggccgtacttcggcaagctggaaagcaagctgagcgtgatccggaacctgaacgaccaggtgctgttcatcgatcagggcaacagacccctgttcgaggacatgaccgacagcgactgcagagacaacgcccctcggaccatcttcatcatcagcatgtacaaggacagccagcctagaggcatggccgtgaccatctctgtgaagtgcgagaagatcagcaccctgagctgcgagaacaagatcatcagcttcaaagagatgaacccgccggacaacatcaaggacaccaagagcgacatcatattcttccagcggagcgtgcccggccacgacaacaagatgcagtttgagagcagcagctacgagggctacttcctggcctgcgagaaagagcgggacctgttcaagctgatcctgaagaaagaggacgaactgggcgaccgcagcatcatgttcaccgtgcagaacgaggactgataa

SEQ ID NO: 1879 - DNA, 2206 bp, Artificial Sequence
  hu25E6-8-28-3z1XX-Foxp3-NFAT-IL-18
atggccttaccagtgaccgccttgctcctgccgctggccttgctgctccacgccgccaggccggaggtgcagctggtggaatctggcggaggactggtcaagcctggaggcagcctgagactgagctgcgccgccagcggcttcacattcagcagctacggcatgagctgggtgcggcaggcccctggcaagggcctggaatgggtcagcaccatcagcaacggcggaagacacaccttctaccccgacagcgtgaagggcagattcaccatctcaagagataacgccaagaacagcctgtacctgcagatgaacagcctgcgggccgaggacaccgccgtgtactactgcgccagacagaccggcacagagggctggttcgcctactggggccagggcaccctggtgaccgtgtccagcggcggtggcggaagcggaggcggtggctccggtggcggaggcagcgacatcgtgatgacccagacccctctgtctctgagcgtgacccctggccagcctgccagcatctcttgtaaaagcagccagagcctgctggacagcgacggcaagacctacctgaactggtacctgcagaagcccggccaaagccctcagctgctgatctacctggtgtccaagctggatagcggtgttcctgatagattcagcggatctggcagcggcaccgacttcaccctgaagatcagcagagtggaagccgaggacgtgggcgtgtactactgctggcagggcacacacttcccccagacattcggccagggcaccaaggtggaaatcaagaagcacctgtgtccttctccactgttccccggccctagcaagcctttctgggtcctggtggtggtgggcggagtgctggcctgctacagcctgctggtgaccgtggcctttatcatcttctgggtgaggagtaagaggagcaggctcctgcacagtgactacatgaacatgactcctagaagacctgggcctaccagaaagcattaccagccctatgccccaccacgcgacttcgcagcctatcgctccagagtgaagttcagcaggagcgcagacgcccccgcgtacaagcagggccagaaccagctctataacgagctcaatctaggacgaagagaggagtacgatgttttggacaagagacgtggccgggaccctgagatggggggaaagccgagaaggaagaaccctcaggaaggcctgttcaatgaactgcagaaagataagatggcggaggccttcagtgagattgggatgaaaggcgagcgccggaggggcaaggggcacgatggccttttccagggtctcagtacagccaccaaggacaccttcgacgcccttcacatgcaggccctgccccctcgctgataagtttaaactgccagaacatttctctggcctaactggccggtaccggcttcattttttccatttactgcagaggcttcattttttccatttactgcagaggcttcattttttccatttactgcagaactagttaggcgtgtacggtgggaggcctatataagcagagctcgtttagtgaaccgtcagatcgcctggagacgccatccacgctgttttgacctccatagaagacaccgggaccgatccagcctcgagagacccaatgctagccaccatggccttaccagtgaccgccttgctcctgccgctggccttgctgctccacgccgccaggccgtacttcggcaagctggaaagcaagctgagcgtgatccggaacctgaacgaccaggtgctgttcatcgatcagggcaacagacccctgttcgaggacatgaccgacagcgactgcagagacaacgcccctcggaccatcttcatcatcagcatgtacaaggacagccagcctagaggcatggccgtgaccatctctgtgaagtgcgagaagatcagcaccctgagctgcgagaacaagatcatcagcttcaaagagatgaacccgccggacaacatcaaggacaccaagagcgacatcatattcttccagcggagcgtgcccggccacgacaacaagatgcagtttgagagcagcagctacgagggctacttcctggcctgcgagaaagagcgggacctgttcaagctgatcctgaagaaagaggacgaactgggcgaccgcagcatcatgttcaccgtgcagaacgaggactgataa

1.-71. (canceled)

72. A chimeric antigen receptor (CAR), comprising:
(a) an anti-Mucin 1* (MUC1*) antibody comprising:
(i) a heavy chain (HC) variable region comprising a complementarity determining region 1 (HC-CDR1) comprising the amino acid sequence of SEQ ID NO: 123, a HC-CDR2 comprising the amino acid sequence of SEQ ID NO: 127, and a HC-CDR3 comprising the amino acid sequence of SEQ ID NO: 131; and
(ii) a light chain (LC) variable region comprising a complementarity determining region 1 (LC-CDR1) comprising the amino acid sequence of SEQ ID NO: 173, a LC-CDR2 comprising the amino acid sequence of SEQ ID NO: 177, and a LC-CDR3 comprising the amino acid sequence of SEQ ID NO: 181; and
(b) a cytoplasmic region comprising a CD3 zeta intracellular signaling domain comprising a mutation in a first immunoreceptor tyrosine-based activation motif (ITAM),
wherein:
when the CAR is expressed on a surface of an immune cell,
the CAR binds specifically to a cancer cell, and
the CAR has reduced signaling as compared to the same CAR but without the mutation in the first ITAM.

73. The CAR of claim 72, wherein:
(a) the heavy chain variable region comprises an amino acid sequence with at least 90%, sequence identity to the amino acid sequence of SEQ ID NO: 145; and
(b) the light chain variable region comprises an amino acid sequence with at least 90% sequence identity to the amino acid sequence of SEQ ID NO: 195.

74. The CAR of claim 72, wherein:
(a) the heavy chain variable region comprises the amino acid sequence of SEQ ID NO: 145; and
(b) the light chain variable region comprises the amino acid sequence of SEQ ID NO: 195.

75. The CAR of claim 72, wherein the antibody comprises an amino acid sequence with at least 90% sequence identity to the amino acid sequence of SEQ ID NO: 239.

76. The CAR of claim 72, wherein the antibody comprises the amino acid sequence of SEQ ID NO: 239.

77. The CAR of claim 72, wherein the mutation in the first ITAM comprises a point mutation at a tyrosine residue.

78. The CAR of claim 77, wherein the tyrosine residue is mutated to a phenylalanine residue.

79. The CAR of claim 78, wherein the CD3 zeta intracellular signaling domain comprises:
the first ITAM comprising a substitution of a tyrosine residue with a phenylalanine residue,
a second ITAM comprising a substitution of a tyrosine residue with a phenylalanine residue, and
a third ITAM that does not comprise a point mutation.

80. The CAR of claim 79, wherein the cytoplasmic domain of the CAR comprises, in an N-terminal to C-terminal orientation, an ITAM1, an ITAM2, and an ITAM3, wherein the first ITAM is the ITAM2 and the second ITAM is the ITAM3.

81. The CAR of claim 79, wherein the CD3 zeta intracellular signaling domain comprises an amino acid sequence with at least 90% sequence identity to the amino acid sequence of SEQ ID NO: 1797.

82. The CAR of claim 79, wherein the CD3 zeta intracellular signaling domain comprises the amino acid sequence of SEQ ID NO: 1797.

83. The CAR of claim 72, wherein the cytoplasmic region comprises a co-stimulatory domain comprising a sequence derived from CD27, CD28, 4-1BB, OX40, CD30, CD40, ICAM-1, LFA-1, ICOS, CD2, CD5, CD7, Fc receptor gamma domain, or combinations thereof.

84. The CAR of claim 83, wherein the co-stimulatory domain comprises an amino acid sequence with at least 95% sequence identity to the amino acid sequence of SEQ ID NO: 378, or 380.

85. The CAR of claim 83, wherein the co-stimulatory domain comprises the amino acid sequence of SEQ ID NO: 378.

86. The CAR of claim 72, wherein the CAR further comprises a transmembrane domain.

87. The CAR of claim 86, wherein the transmembrane domain comprises a sequence derived from CD4, CD8, CD28, 4-1BB, or OX40, or combinations thereof.

88. The CAR of claim 86, wherein the transmembrane domain comprises an amino acid sequence with at least 95% sequence identity to the amino acid sequence of SEQ ID NO: 364, 366, 368, 370, or 372.

89. The CAR of claim 86, wherein the transmembrane domain comprises the amino acid sequence of SEQ ID NO: 368.

90. The CAR of claim 72, wherein the CAR further comprises a hinge domain C-terminal to the antibody.

91. The CAR of claim 90, wherein the hinge domain comprises a sequence derived from CD4, CD8, or C28.

92. The CAR of claim 90, wherein the hinge domain comprises an amino acid sequence with at least 90% sequence identity to the amino acid sequence of SEQ ID NO: 346, 348, or 350.

93. The CAR of claim 90, wherein the hinge domain comprises the amino acid sequence of SEQ ID NO: 350.

94. The CAR of claim 72, wherein the CAR further comprises a hinge domain, a transmembrane domain, and a co-stimulatory domain, wherein the CAR has an N-terminal to C-terminal arrangement of the anti-MUC1* antibody, the hinge domain, the transmembrane domain, the co-stimulatory domain, and the CD3 zeta intracellular signaling domain.

95. The CAR of claim 94, wherein:
(a) the anti-MUC1* antibody comprises an amino acid sequence with at least 90% sequence identity to SEQ ID NO: 239;
(b) the co-stimulatory domain comprises an amino acid sequence with at least 95% sequence identity to SEQ ID NO: 378; and
(c) the CD3 zeta intracellular signaling domain comprises an amino acid sequence with at least 95% sequence identity to SEQ ID NO: 1797, wherein the mutation in the first ITAM comprises two point mutations at two tyrosine residues, wherein the two tyrosine residues in the first ITAM are mutated to two phenylalanine residues, wherein the CD3 zeta intracellular signaling domain further comprises a mutation in a second ITAM, wherein the mutation in the second ITAM comprises two point mutations at two tyrosine residues, and wherein the two tyrosine residues in the second ITAM are mutated to two phenylalanine residues.

96. The CAR of claim 94, wherein:
(a) the anti-MUC1* antibody comprises the amino acid sequence of SEQ ID NO: 239;
(b) the hinge domain comprises the amino acid sequence of SEQ ID NO: 350;
(c) the transmembrane domain comprises the amino acid sequence of SEQ ID NO: 368;
(d) the co-stimulatory domain comprises the amino acid sequence of SEQ ID NO: 378; and
(e) the CD3 zeta intracellular signaling domain comprises the amino acid sequence of SEQ ID NO: 1797.

97. The CAR of claim 72, wherein the CAR comprises an amino acid sequence with at least 90% sequence identity to the amino acid sequence of SEQ ID NO: 1785, wherein the mutation in the first ITAM comprises two point mutations at two tyrosine residues, wherein the two tyrosine residues in the first ITAM are mutated to two phenylalanine residues, wherein the CD3 zeta intracellular signaling domain further comprises a mutation in a second ITAM, wherein the mutation in the second ITAM comprises two point mutations at two tyrosine residues, and wherein the two tyrosine residues in the second ITAM are mutated to two phenylalanine residues.

98. The CAR of claim 72, wherein the CAR comprises the amino acid sequence of SEQ ID NO: 1785.

99. A vector comprising a nucleic acid sequence encoding the CAR of claim 72.

100. A viral vector comprising a nucleic acid sequence encoding the CAR of claim 72.

101. A lentiviral vector comprising a nucleic acid sequence encoding the CAR of claim 72.

102. A cell comprising the CAR of claim 72.

103. A cell comprising a nucleic acid sequence encoding the CAR of claim 72.

104. The cell of claim 102, wherein the cell is an immune cell.

105. The cell of claim 104, wherein the immune cell is a T cell, a natural killer (NK) cell, a dendritic cell, or a mast cell.

106. The cell of claim 104, wherein the immune cell is a T cell.

107. A method for treating a MUC1*-positive cancer, comprising administering to a subject in need thereof a therapeutically effective amount of the cell of claim 102.
